United States Patent Application Publication US 2026/0258423 A1 - sequence listing, part 15

SEQ ID NO: 167803 - DNA, 46709983 bp, Homo sapiens (residues 13,345,713-15,013,926 of 46,709,983)
  source 1..46709983: mol_type = genomic DNA
atttcatagttaatacttttttttttttttttgtgagatggagtctagctcttgttgtccaggctggagtgcaatggtaaaatcttggctcactgcaacctccgcatcccaggttcaaatgattctcctgactcagcctcccgagtaactgggattacagacacccaccatcatgcctggctaatttttgtatttttagtagagatgaggtttcaccatatttgccaggctggtcttgaactcctgacctcaggtgatccgcccgcgttggcctcccaaagtgctgggattacaggcgtgagccactgcgcccggcccatagttaacacttctataaatatttgtgcctattgaaaggaacatcgctccctacactgcaactgaacaaaagagtgataatgttaatttctttattcttgggcttttcttgaataaaagagggtcataggatatggaacaaaatagactagaaaatagggttgataaggtactgattctgccaacactgcttaatgctctccccaagcaattgtcttttagatatgttatttcccagtgtgaatggtattttttaaatatgtcaagcaattaagaatataagtatattctcatctcagctaaacgtagaatctttacaaagaatttttggtatccttaaccctaatatgtggagggataagattaaaaatgttcaccaccttatttttatttatttatttatctattattttgagacagagcctcactccaccctgactggagtgctgtggtgtgacctcggctcattgcaacctctgcctcccaagttcaagtgattctcctgcctcagcctttcaagtagctagaattataggaattcaccaccatgcccaactaattttttttatttattatttttttttttttttggtgagatggagtctcactctgttgcctaggctagagggcagtggcactgttttggctcactgcagcctccaccttctgggttcaagcaagtctcctgcctcagcctcctgagtatctgggattacaggcacccaccaccacacccggataattttttgtatttttagtagaaacggggtttcaccatgttggccaggttagtattgaactcctgacctcaagtgatctgcctgactcggcctcccaaagtgctgggattacaggtgtgagctaccacatccagccatcacctcctgtaaagtgcagtaaagaaatagtgggcaatagacaggcaggggatagaggaaaatgttttgggagtgggacaatatgaacttattgtcatgacaggaccaaaaagggaagatgtctgcctatcataattaataataactctgtcagtcaacatttatgttttacaattgttctgtaaaagccagcaaatattacagattccagtccctaataactgatcatgaaagacactctaagcttgtgcatcagcattctctttttatctaaaagaaaatatattaaataaagggaggaatggcaggagtaaagagacttgaaggaaaagaaaatattgacttattaatgatattttacaatgctaagacctttagaaaccaactactccatatgtcttttaaatattagtttggtgcaaaggtaattacagtttttgtcataaaagtaatggcaaaagccacaattacttttgcaccaacctaactgatacatttattccattttggaggtattgcaaatatgctgaatcaatgaatttcttcagtatttttcattgtattagtacaaatttaacctaatagtattcttctgcatgttatttccctttgtgcttcctttaatgcaatgaagttgtagttaccaaatagagtgctctaaaagggcaaggcttgtctgtgaattgagcctagcatagaattggctctcagtgaagatctgttgaacatttcatgaatgcatcaacatcataatccttcatgtgcttgtaagcaattattaaaattttctctagcctattcaggcctgtgttcttcaaaattctccaaaatatatggacgtgtttgctgtttctattaggttttaacttctggtgtcagaaaccagggctgtttttcttaatttgtgtcctaaaaccacagtagggttgtatgcattgtgataatgcttaataaatatataaaaagattaatatccattcatttacattttcttaaacccaatttctggatgagtagctgtgaaactctcaactggatgagctctgactagtgttaagtatagtatattgggaacagggctttatatgcaacatatatgtgaggcaaatgagaaatattagctgggctacattaaatcccaatgacatgaatagaaattttattatccaggtagcaaaaatgaagtcaaaaaaataaataagagaatgaagtgaaggtatggggcaaaacaattagttttttatttaagtcaatattttagaaaatagcttctgaaggcccaatcacacagataattgacactacgacttttctttgcactgtgttagacataggtaaaagaatgtctcagcactgtaccttcatgtagaaaatgtaattaatagcaaattgcataaaagtacactaaaattttaattcttacatcattttaataaatttcttgagattttactttatttagtgtgtcattaaaacacaggatttaaggacgatatatgtaataaaggaaaatagtaagttaccattcttgtgtaaacacgttttgtaaatactatttcaacaaagatttaaaagttaattacaaaggtataaagttatgaagtattatataaaccggattcataattttgttttaaatggtcttttcatgtatcaaaatactatcagtttaaaacaatctctttttttaaggcagtaggctctgtttaccatcatttacaattgctttaattagaattttcttcactttcagtatattcaagagctattctgttagccataatttttaagataaagtttatccaaatagaaaagtaattatataatgattaagagccagaatgtctgggttcaaattacagttctgctacttctcaggtataagaatttgggcaaatttcttagtttctctgtgcttcagttccctgatctgtaaaactgggataacaagactacctgcctcaatctgtggttatgagtaaatgagttaatacataagagcaatgcaataatccttggaatgtggtatgagttaaataaacattagctattattattatagtaaattagaaatttaattctagagaataaaaagctgaactcaaatatgtaactatttatttgatacagacacattttctacaaaataaaaaaccgtcagtttgcacttcccttatataatgactattctggtgtttgtgtgtatctgttgtgggtcagagttttgggctgcgtaaataatcactaaaaattttaaaaacttccgattaaaacagaaataagaacaaatggccattcatggatcactggcaaagctgaacgaatacctgacatgtctttctgtgattccttgcagatatcatggaaatcaggacagtggcagttgggattgtggcaatcaaaggggtggaaagtgaattctatcttgcaatgaatgaggaaggaaaactctatgcaaaggtattgataattgatcgcttaggcttaatttttaaaactcatttttgtcaaaatatctcaccattctgaaaaggaaaaatggacttaatttatctccaactgtgtaatttaatgattttattaaaacactttatactcaaacgttaagaaaaaatgttttctgtgtgactttggacaaatggcttgttctttggattttggtttcttcatctgtaaaatgatttgaattagctgacctctaaggatccttccagctctaaaattccatgtgcattttagatatttaaaatccaaaatttccatttgccagtattaaagctctttttgttaaagttcacccaatttgcacattgctgacatgaaaattcttgggaaaaaatcttgaaatgtttagttcattcatcaacatcaatctcacaatcatgggctttgaactgtaattattcacattgttcccacttcactacaatgcaaaatatgtaacagttcatcccactgtaataaaatatgattggctttcctttgtattcccagagctcagtataatgcctggagcaggctaattatataatgatacaggtttaattgaatgaacaaatggttgcgtgcatgaacaaacaaattaaccttttatcttccattaccattgaagacaatgtagaagtaaataaagaaaagttatgaaacaagtctctcaccgagggaggcagatgttctgctagttataccaaatttccagtggttaaagaatgagtgatatgggaatagtaatatgaggcctgttacttagggggaaataggtcctaattttaaagaatagttgacatgaacttccaaaaagctacacatatttcataactagctgtgtattatgtggtgtttttatttcaaatttaagatacctttttatgcaaatatactacataagtatagctaataaaccacattaggcctgctcaatctgagggttaaaaaaagttgtgtatgtttcaattctaacaaatattacctgcttactcttcgtttaattgagcctctctaaaaatcatttggatcatgtttgtttgtttgtttgtttgttttaacagaaagaatgcaatgaagattgtaacttcaaaggactaattctggaaaaccattacaacacatatgcctcagctaaatggacacacaatggaggggaaatgtttgttgccttaaatcaaaaggggattcctgtaaggaaaaaaaatgaagaaagaacaaaaacagcccactttgttcctatggcaataacttaattgcatatggtatataaagaaccagttccagcagggagatttctttaagtggactgttttctttcttctcaaaattttctttccttttattttttagtaatcaagaaaggctggaaaactactgaaaaactgatcaagctggacttgtgcatttatgtttgttttaagacactgcattaaagaaagatttgaaaagtatacacaaaaatcagatttagtaactaaaggttgtacaaaattgtaaaactggttgtacaatcatgatgttagtaatggtaatttttttaaattaatttacccttaagagtatgttagatttgattacctgataatgattatttaaatattcctatctgcttataaaatggctgctataataataataatgcagatgatgttatataaggtatatcagacctacaggctgctggcaggatttgtcagataatcaagccacactaactttggaaaatgagcagccttttaaatgctttctagtgaaaaattataatctacttaaactctaatcagaaaaaaagaatattctcaaaaaaatctattatgaaagtcaataaaatagataatttaacaaaagtacaggattagaacatgcttatacctattaacaagaacaaaatttctaatgctgctcaagtggaaagggtattgctaaaaggatgtttccaaaaatcttgtatataagatagcaacagtgattgatgataatactgtacttcatcttatttgccacaaaataacattttataattcctcaaagtaaaattgagaaatctttaagtttttttcaagtaacataatctatctttgtataattcatatttgggaatatggcctttaataatgttcttcccacaaataatcatgcttttttcctacggttacagcattaaactctattttaagttgtttttgaattttattgttttgttatttaagtttattttatttattaaaaaccttaataagctgtatctgtttcatatgcttttaattttaaaggaataacaaaactgtctggctcaactgcaagtttccctcccctttgtgactgacactaagtctagcacacagcacttgagccagcaaatcctggaaggcagacaaaaatgagagcctgaagcaatgcttacaatagatgtctcacacagaacaatacaaatatgtaaaaaatctttcaccacatattcttgccaattaattggatcatataagtaaaatcattacaaatataagtatttacaggattttaaagttagaatatatttgaatgcatgggtagaaaagtatcatattttaaaactatgtatatttaaatttagtaattttctaatctttagaaatctctgctgttcaaaaggtggcaacactgaaagttgttttcctgttagatgcaagagcacaatgcccaacatagaagatacagttaggaataaggggccctgaatgtcatgaaggcttgaggtcagcctacagataacaggattattacaaagatgaatttccacttccaaagtctttcattggcagatcttggtagcactttatatgttcaccaatgggaggtcaacatttatctaatttaaaaggtttgtaaccattgtggttttaatttcaaaatatttgtcattcaagtccctttacataaatagtatttggtaatacatttatagatgagagttatatgaaaaggctaggtcaacaaaacaatagattcatttaattttcctgtggttgacctatacgaccaggatgcagaaaactagaaagaactgtccttcctcagatatactcctgggagagagcatgaatggtattctgaactatcacctgtttcaaggactttgctagctaggttttgaaatcaggcttcagtaactgtagtcttgtgagcatattgagggcagaggaggacttagtctttcatatgtgtttccttagtgcctaccagactatctgttcataatcagttttcagtgtgaattcattgaatgtttatagacaaaagaaaatacataataaaactaatcttcattttgaaagggtaaaacatgactacacagaaatttaaatagaaatagtgtatatacatataaaatacaagctatgttaggaccaaatgctctttgtctatggagttatacttccatccaattacatagcaatgctgaattaggcaaaaccaatatttagtagtaaatccattcctggtagtgtaaatcacctaaaaaagacttctagaaatatgtactttaattatttgtttttctcctatttttaaattatgcaaattttagaaaataaaatttgctccagttacacacacttagaattctagaatcttaaaactgtaaggggcctccatccctcttactcatttgtagtctaggagatcgagattttgataaacctaaggtcatgcagctgggtagatatacaactgtcacaagagtctagatcagttggcacatgctttctacactagatcattagtattattagctaatggtcttctgcatttttttgtttttgatttctattgagatatagcctttacatttgtacacaaatgtgactatgtcttggcaatgcacttcatacagaatgactaatctatactgtgatgatttgacaaaaaggagaaaagaaattatgtagttttcaattcagattcctattcaccttttgtttatgaatggaaagctttgtgcaaaatatacatataaacagagtaagccttttaaaaatgttatttgaaagataaaatcaaatacatgagtttctaacaattagaaaggaaaaaattaaaatatgaaatgataacaaaagtaaacagaagatactttcaaagcagtgaacaaaacattttgacataaaccataatataaattataatataaaaatataaaaaccatagtataaattgtcagcctttgagttggctacaaattcaatttaatgacagaagagaagggatgctggaggtaaattcttagggtttctatctcatagagtttgctcttctggttctctagactgccaaagaacataaagatgtacgaggggacctagctgtggtaaaagcattcctataacaacaaaaactctaaaacggtgcccctcacgattttctactgaaatttctctaatagtagaggtataaaatatgaagttagagaataatgcaaagggggcccaccacagacagcacatttcttttctcttaagactcatgtgatttttgcatcttactccataatgtattagtggttgcgttaatatgacaatgactgcaattaaacaccagtaagcaaaattgatacctcagaatgacttgcagggcttatcatgcagtttcatttacatccctaccccactgccatttacttgagcatgaatgatacatgagagagtctttgcctcccataatccaactttacacataaataacacaaggctaaagaaaaccagaactcaaattcaccatgcataggagtgataactaaaatatttaacagtcggtataggtgattactggccaatcagaatacatcactgatatatcgaaatggatgcaggccactgtgactaacttgtgggtatcatttctatgatcaccttaaagcagagttgggaaaatgtctattaactggtctctctggtttgaattctcaatatgtatcttaatatgaaatagctcattaaaacttcatgtgtaactatttcagcactgttgtcagctactctttattccacttctgtacagtatttattcaaccaagctgctgctttcagtgaaggtcacttgttccttcagggacacatatactcccacctatcctttaattttgaatggtttgtcaagaaaatttactttctcttgagttgaaaagacttgacaggaagcaagaaataatacagtcctagcctctttccagtaacatctgatttctccattctcaaactacacttctcagggaaccagatatttactctcatctgggaagatgtcgcttatgttttccttttacttcctggttttcatgtggttgcattttccaaattcttatcattgaatttatgagagcctatccaaatttattttctttcatttatattctaataattgaaatgtgagatgaaaataacatttcacttatgaaaaacccttctcttattgaatccttccatgtggtagttatctattgctgtgtaacaaattaaaacttaatggcttgaaacaaatatttgttttctcatagtttatgtggctcaggagcctggacatggttcagcacagtgtttttggtcagaattcctcatgaggtgcaatcaaggtgtagcccagagctgtagtcatctatctcaatattcaactcagaaagggatccaccttagatcctcactggctgttatcaggacctatcacttccttaccacatggacctctccatagcactgcttacaatattacagtctgtttcccacggagcaagaaatcagagtgtgagataaagtacccaaaatggaagccacaggtttgtttgtttgttttaatatatataacctagtttcaaaagtgatgttacctctgcctacactcatgaggagggtattatacaaaggcatacataccagaaagcagggatcactggaagccattttacaggctgcctaatccaagtcataaactagatgtttttaatgtcactgccataaactgggattctacagggtctaatgagagtaattcatggctttcagtggggatccattcagcagagaaagagatgaaatatgtatattctctgtggaaacattcttgattcttccttgaaggatactgcgtggtccattcctacacaggataattaagaaaaggtttgaaccaatctggacttcctattagcctgagatgtggctacttagaacttccaatgaagctggaaaactaacaatatgcctttgcctccacatgaagcaaattaccctgccatcagactcaacatgaagataatcctccctttggctgccctacctcaagagaataagatcatagattccagctggaattcctctgggccatagagtgttttgttctagatgctgaaggcaatcagccaccatttacccaagaccgtctgagaataagacctaaaaagacttgaaaacaattgatttcaatggtaggtacacactggtatcccctgttccgtatatatctatagatatatagatataaacagaacaggagatatacatatatatatatatatatatatatagagagagagagagagagagagagacagagagagagaaagagagagagagagagagagagagagacacctaggccccaactcaggccaattacatcagtgtatatgacaggtggcccatgcagtggtattttaaaaattccccagaagattctaatgtgcctctgcagttgagaactaattaggtaaatgcaaacaacaacaaaaaccaaaaaacctcttcagaaactatgcctgcttcttcatctttgtctcttctttaaacaccttgaaaggccttattccctcccagcccttcctgcccctaggttttcctagatgcctccatattttctgctatgcacaactggggctcacaggaaatgtaggcactagaaagagagttacaattgtttttgcatcagaatgattatggaacagaaaagggcatttcatgcaaatggacaccaaaagccagcagcagtagctattctcatatgagacaaaacaaactttaaagcaacagtagctaaaagagacaaagacaggcagtatataatggtaaaggtctcatccaacagaaaaatatgacaatcctaaacatacatgaacctaacactggagctcccaaatttataaaacaattactagtagacataagaaatgagatagacagcaacacaatgatagtgggggacttcaatactccactgacagcactagacaggtcatcaagacagaaagtcaacaaagaaacactggatttaaactatactttggaacaaatggacttaacagatatatacagaacatttcatccaacaaccacagaatacacattctattcaacagcacatggaattttctctaagatagaccatatgataggccataaaatgagtctcagtaaattgaagaaaattgaaattgtatcacgcactctctcagatcacagtggaacaaaactgaaaatcaactccaaaaggaatcttcaaaaccatgcaaatacatggaatttaaataacctactcctgaatgagcattgggtgaaaaacgaaatcatgatggaaatgtaaaaaatttcttcgaactggatgacacaacctatcaagacctctgggatacagcaaaggcagtgctaagaggaaagtttgtagccctaaacaccgacgtcaaaaagtctgaaagagcacaaacagacaatctaagttcacatctcagggaaccagagaagcaggaacaagccaaacccaatcccagcaaacaaaggaaataaccaagatcagagcagaactaaatgaaattgacacaagaacaacaacaacaaatacaaaacataaataaaacaaaaagttggttatttgaaaagataaataaaattgatagactattagcaagattaaccaagaaaagaagagagaaaatccaaataacctcactaagaaatgaaacaggggatattacaactgacaccactgaaatattaaaggttattcaagggtactattaacaccttttggcacataaactagaaaacctagaagagttggataaactgctggaaaaatacaaccctcctaacttaaatcaggaagaattagataccccaagcagaccaataaatcaagcagcaagattgaaatggtaattttaaaatttccaaaaaaaaaagccgaagaccagacagattcagagcagaattctaccagacattcaaagaatgtcttctttcattcagagaagaaatgataccaatcctttcacactattccacaagacagagaaagaagaaaccctccctgattcattctatgaagccagcatcaccctaataccaaaaccatgaaagaacataaccaaaaaagaaaactacagaccaatatccttgatgaacacagaatccaaaatccctaacaaaatactatctaactgaatccaacaacatatcaaaaacataatccaccatgatcaagtgtgtttcataccaatgatacaggaatggtttaacatatgcaagtcaataaatgtgatacaccaaataaacagaattaaaaaaactcacacgattatatcaacagatgcagaaaaagcatttgacaaaatctagcattgctttatgattaaagctctcagcaaaataggcatacaagggacataccttaatgtaataaaagccatctaggacaaacccacagccaccataatactgaatggggaaaaggtgaaagcattccctttgagaactgaagcaagatgaggagcctactctcaccactcctcttcaacatagtactggaagtcctagccagagcaatcagacaaaagaaggaaatagaggaaatccaaatcagtaaagaggaagtcaaactgtcactggttgctgatgatatgacctttctccttgagaaccctatggactcctctagaaagctcctagaactgatgaaagaattcagcaaagtttccagatacaagattaatggacacaaatcagtagctcttctatacatcaacagctaccaagcagagaatcacatcaagaactcaaccccttttacaatagctgcaaaaaacgaacaaaaataaaacaacaaaacttaggaatatacctagcaaaggaatcaaaagacctctacagtgaaaattacaaaacaatgctgaaagaaatcatagagggagccaagcatggtggtgcatgcctataatcccagctactcgggaagctgaggcaggagaatcacttgaacccggtaggcagaagttgtagtgagccaaaatcacaccattgcactcccacctcagcgacaagagcgaaactccctctgaaaaaaaaaaaaaaaaaaacaagaaagaaaagaaatcatagatgacacaaacaaatggaaacgcatccccatgctcatggatgggtagaaccaatattgtgaaaattaccattctgttaaaggcaatctacaaattcaatgcaatccccatctgaataccaccgtcattcttcacagaattacaaaaacaattctaaaattaatatggaaccaaaagaaagccatgtagtcagaccaaggctaagcaaaaagaacaaacctggaggcatcacattacttgatttcaaactgtacaataaggccatagttaccaaagcagcatggtactggtttaaaaataggcacatagaccaatggaacagaagagagaacccagaaattaacccaaatacttacagccaactgatcttcgacaaagtaaacaaaaacataaagtggggaaaggacacccttttcaacacatgatgttgggataattggcgagccacatgtaggggaataaaactggattctcatctctcaccttatacaaaaatctactcaagatggattaagaacttaaacctaattcctgaaccataaaaattctacaagataacactggataaacccttctagacattggtataggcaaggatttcatgaccaagaacccaaatgcaaatgcaataaaaacaaagataaatagctgggacttaattaaactaaagagcttctgcattgcaaaggaaacagtcagcagagtagacaacccacagagtaggacccctgaccctgacccgtgaccctgacccttaacccctgaccctgacccctatcccctgaccctgacccctatcccctgaccctaacccctaacccctaaccccggacccttaaccctaacccctaaccccaaccctcactctcaccctaacccctaatcccaaaccactaacctctcttaacccctaactctaaacgttgactcctaacccttaactctgaccctaactcctatctccaacccctaaccctaaacttaacccctaacccctaaccctaacaccaaccttaaccctaggttcgttactacgtttgtattgactatgtcaatgttgattgttatgatcgctgtctcaggactgcacggcagcgaggggattgcggatcttatattaatatttttgtattgaggcagtgcattagcattacaggtgcttgttacatgagcaatgggggtgtcatattttgggtgtcatgtctgcattaggaatgttgcatttgtcttccgaggctgcggtgtggatcttgcactgtggccgcctcgccttggctggggagaacctcggtgggcaggattcagaggggcttttggtttcccgttttccacactgaacccttctaactggtctctgaccctgattattcagggctgcaaacaggaaggattttattcactgtcgatgtggccccgagttgtcccaaagcgaggcagtgcccgcaaggtctgtgctgaggagaacactgctctgccttcgcggtgtcccccgggtctgtgctgagcagaacgcagctgcaccctcgcggtgcccccggcctgcctgcccgcccaggtctgtgctgaggagaacactgctctgcctttgctatatctctgaagtctgtgcagaggagaactcagctccgccctcgctatatctccgaagtctgtgcagaggagaactcagctccgccctcgcaagagggtgactgggtagctgatgaatggcagcccctcctgcctgaatgccctctattgctgggcattgctgcacagcacctttttcctggccttaatacttacttaacaatcttttagagagctccacgcctaacacggaatcttaaaatgtgacattcttcctataaaatcaatagttaaaccacattttgtaaattcataccaaaatagaaacccaggaaaaaaagcaccccttttgtcctctattttaataataagagggaaagggggctgggctaaagggaggggctgggctaaagggaacggctgccctttctgtgtgtggaaagctataatttaaatatgcacaccagattttcaagcagcacactctaaagcatcagccctgttattcggatgatggagtttgcagactttctgtttgccctcctcttgcttttcccacctttggggcttttcactgtccccagaaacccaaccttagaatcgagaaagaaggcaaagaccgtatctaatagactcataagctccttattaataatagtgcagtaaagtgtaaatggggtaggtgcctttttttgcaaaacgaagtttctagattctctgtgttgcatttagccaggccctcatttctaaccacagggtagaaaatcaagttaacaaagaccgtgttttgtccttctatttccatacggacgtcatgtttcacacctgcactcctgtctgctcggttccacaaagggagagtaaccactgagtgcattttaaatgttctttgactgcttgcgttttcaaaagcacagcacacgagcatctcggtcaagatgagctggtaggacctctcctgacaccctattccctcacagtggacctctcactggaaacctccacttttgctgcttagctcagtgtgtctctgcaaataggcatgtttaagcaaagaataaatgcctaaggcgatgcaggtgggtagcaggggagagtcagggagacaaaaagaacagtagcacttacatggagctctgccaccttttgggctaacatggtcatgaacagatcaggaacctgaggcaatcaaaggacttcaccccacaaagccagggcactctcaggagctggaaaacccaggagaatttccacatattcctgagagttcctcgtgcattacctttagtgcctcattagcaggaatgggtccttctgtggcttcaccagactgtttcgcagtagaaagaggacagaccaaggagccccagtcccacctgtgacctcaggcagtcacctgacacctctgagcctcagttttctcatctgttcagtggggatggtatatttctccttacagggctgtggaaaggacaacataatcttacacagaaaaagtagtactaagctaacattggttgagtgcctattacattctacacaacgcgctaagtactttgcatattttgtctcattgaattctgatgacaaccctgtgaagtaggaactcttactatcccccatgctatggatgcagaaactggggctcagagcagttaagtacctggccaaaggccagaaagtcaactagaattgatgtgtccattttcattcattcattcattcattcatcatttattgagtacccgttccacgccaggcaatgagaagcaaatcacaaatactccctgccccatggcactgacagtcttgttactgcaaagtacaaggtgcagagtaaatggaagtcaaatcagattccaacttctactcaactcccagtaggccccagactaaactctccagaacaatggtactgctcctgtggttttgcctggtgctcacgattgagacatactcaaagaagagactgctggctctgcaggtcctccagggacagaagccaggaatgttggccaatacagaaacatcataaacattttccttgtatttgatgcattcctggacccatagatctgaaagcaaccttgagaatgcattgaatttatttctctgaatctgaggaagattacatttaaactttgcgtgacagagatccagctagggaatcttcaccttaaaaacctggctaaacaaagctcgtattcataaacaggtgaacttaagggcatccccatgcttttaaatagtgaacactctggtgcattttaagcaggactgattcagtgtattctcttagcacacagttttcaggaacgcaaaatatacctgtgcccagcatcttaagtcttttaaaaagtagatgatgcctttctctctgttcacttacaagctcacgcctttcaaagcatttgtttggaagtccttccttaaatctaacctgaatccaacctgctgtgcttaaggttacctcagtaatctttctaatacaacccaagagagaaggactggagggaagaatttaagacccccatgagatcaggagcagactcctaagttagttgtatcacttgtggctaaatgttggtatcatttccctaattttttctagccactcccaggcactccaactgactctgagaattttcttcttgaacacacttaaagaagcatctgaaatttgtgccatgcagcttagcacttactcaacaaggatgaatcttagagaccatcaagttttgcccttgcaggagagaagaggaaactgagattcagagaactgtgacttaatcaaggacacatagcaagtctgtggcaaagctgggaaggtgacccaaactccagaccccaagcccagtgctttttttttttttcagatctatgtctcccccacatctgactctgttttcctgaggtccagagccatgccctgttcctttttaggagtctcacgacccaggcttaggcacattagttgtccaaagcacacttggcttgctctgacttgaacagtacaatgagctatgtcttagtttcaggcaagaccaccttgaccatgggacatgaaaaggcactctatggggcctctactatgatgtagcagggactgtgttagcacattgctatagccctgggaagcaagaattcttagcgcccattgcccagatgaagaaactcactttcagagagggtaaagaatgtctctatggtaccacagctatacagtggccaggctggaattcaaaaccaggtttgcctgcctccttctcctgtatgatactgcttcataaacagtccccagaaccttaatgaccaggtggaacgaaccaacaaggtcatgctgaaattgtgcaccagtgccctaatgaccaagagaaaatacatttcattcaattcaaaggtataaagatgtaaggtagaagccaccaactgtggacatggaggagcctcagagtgacagcacctgctgtccaggggctcctcctcctctcttccctcgcagtttctctctcccttcctttaacacttattgactatgccagccacacagtaagcgctcaataagtgtttgggcccataaccttcctatgggaaagccccttcacgttctgaacatggcctggcactgtccagatgcccttctgtcctgtgtggtcctgggcaggggcatctccttctcttccaggaccgctctgaaccctaacttgatggcagctgcctggcaatctcatcatcctcctgacatggccatgtagcttctcagcttccatcattcccgaaagtctgcaaggttatggggttgccttgctccagaggacacaaaatcgcttagctctgcttggatttgctcttggctagtggagacctgtgactgctcttccgctcccttgagccttcctcatggaggtttgctgaggcacagtctgcgattgattcctcatgctcctgctaggttttaacagctggtgaaaacgtctgctcatatttcactcacactcccctggctgtgggttcaagtcactgttgatttggtcattgggttacacacatatgcagcctggggtggacctgtatgagtcttcccagaatcagcggccttgacctctcatgaggtcactcccctaggctttgagaaccactccttgaatatcatcttggaacgcgtaaaacaaacaacaagaggtttgaaagggctcaggactctgcatttgaagaatcaaactatactatcttctgggcaagtcactcccctccttgtacatgagttattccattcataaaagggaagaacagggatagataagcttataggtcccttctgcacccaggctctgcctgattctgctgaaccacaacttcgggagggtggccaagaggtctttctggtccctactaaccgctttcatctattcccttaacctgaggtctgaaaacactttttttttggcttcaaaatacaaaaagagaaaactgaaaaatcgaaatagataaaactttaattaaatgtctacataatggaatgttatgaaaacatcattaattgttaaagttgatgttcatacaaattgtattacacttaaaaacaatttgttccttagaattactcactttgaaagggttttcaaataagtccagcgattgctaaggcctcatagccatgaattagtcacagccaaccacaagcaaaatcattaaaacctcttttaaacatactacagcaaataataataataattaacgtgaaatgtgggtgactttcagtatgtttgataaaatgtgggttgaaatctccaaaaggaagagcgttcagggtcttcgaaagtcttaggattactgtagaaccagagtatagaatatgcactcatatttataaatcacttactctgtgccaggctcttctgaagcccttcccatgcattaactcacttaattggtgagacaattcttgaggtagacacaatcaccattcctattctacaggtgaggaaactgactaagcaagtaagtggcacagctagaatggaaatcaatggcaccagggctcatgttctcagccaccttaccacatacaaagcttgccgtgccgggtgtttccccgggaggaaacaattgctggcaggttaagaagggagggaggtacatctccctaatgaggagtgcacttgacaccgagttaaatggaacccattcctcgctcggctctactgctacttgctaactcctctgtggttctcttctgcccacagaggtctcctctgtagctgactctcagcctcgcctaatgctattaataataaagagctgatgttattgagagctccatcagcattttatacaggacttaatctcattcaatccccatgacctccatttcataaacaagggaattaggggtttagagaactgaaacaatttgcccacagtcacatagctctcagaaatagcagaagccaggattcacactccaatcttattctaaagcccaaattctctctctttttttttttttgagaccgagtcttgctctgtcacccaggctggagtgcaatggcaccatctcggctcactgcaacctctgcctcccaggttcaagtgattctcctgcctcagcctcctgagtagctgggattacaggtgcctgccaccaggcccagctaattttttgtatttttagtagagatggggtttcaccatgttggccaggctggtctcaaaattctgacctcgtgatccacccacctcggcctccccaagtgctgggattacaggtgtgagccaccacgcccggccccaaattatcttttaattataaagatatacatattgtttaaacaattcaataaataagtatactgaataacaaagtgaagtcttccctttaccacaatcaacctactgttctgtctctagctgaggctctcttcctacgttccactgtcccagacttctgcaaagtatttatgtatctatttaggtatctgtccatctttccattcctctctcaattatatattctggtggtttcactctccatgtggcaactctacatccaggatcaaaacggcatcaaaggaagcttggaacagtgacaacccctacctgagatgtctccattctaggggcaaggctgcctggtctggtgcctggtatccatgagattaggaaaagtaggtggggtcctgtccaccccttctattcccgaacgcttgtcagggtttctgtggctaacatgccagttgtatcgactcctgcacagtctcatgtgaagtgccacactacattctcagcctggaaggtttcagggctcagctggctcagattccatgtgtggggagcattaagaaaaataggtcacctgtataagactagtggcaaaaatctgactcagtgctaattctctgtttgtcctttacttaaaaggagaaccataattaaaatgatccagaaaagagaaccaagcaggagactgagttgcttggggaaaggaccatgctgcattgatttctacataaccaatggcagcagtgcattggatacacaacaggttctcaataaattgttaaatggataagttgatagaataaaaaacaaggtctcttcccagtgctgcatgcaaaaaagctgagagtgaattcttatttgcaaagatgagagatttttagtcttctgatggctgtttcctcctctctgtttcctttgccacagtttaggggcaaaaaaaagtttccatctctcagaaatggtaggagaaacccttggggcttagctaacaaatcaggctctctctttccaaagttgtgagaatagaaatatttcaccatcagcaccaacaatgtcatttgcataaggaagtgacttcctagctgagagatggtcagaataacatagagcctaggagtgaaggcagtgaagtttgtgagcctagggctctggttctggtgtctgcttcgtggctgtgtgatcttgggcaagtttcctacattttctgcttctcagttttgtcatccataaaataacaacagtacctgcctcaaatagtgtgtgggagaggcttaaacaagctaatgtaagtcaaatcttgagcacaatctctggtgtagctatacatgcttgtgtatatatcagaagctcaaaattataccattagtattaacaacatactctggaccctcattataatgccattttcaatatcccaacacttgatttctattgacaactcctaggctcaactgttcctcccacctcggcttcccgagtagctgggaatatagccaccatggctggctaatttttaatatatttttttgtagggacagggtcttgctatgttacccaggctggtctcaaactcctggcctcaagaaatcctcccacctgggcctccccaagtgctaggatttacaggcatgagccaccatgccaagctcccttcctcccctttgttctcctaaccccatctcagcatctgcccctgaggaccaatgcaacagggcaatcagtacatccatggacttcccaacagtcctgtggtggactaacccaggggcaatggtcactgtcccctctggtgcattctttgtccccatcagcctagtaagctccaggggctggcagctggcacagagtacgaggctgcactccttgacctttctatgctgcacacagtcctgtgcccattctgtcctcagatctgccgggaccatgaccaacctgccaagagcgtgggaattggtatgtgacccagctctaggaggaggtggagcaagcgaatgtaggggaagctgctcacccagtaggtttagagggagggtggggtgggggcgcagcaggaccaggcaggtgagggtgtgtgggtgaggatgtgccggtgtgggtaggggtgtgtgggtgggggtgtgcaggtgggggtgtgtgggtgggggtgtgcaggtgggggtgtgtgggtgagggtgtgtgggtaggggtgtgtgggtgagggtgtgcgggtgagggtgtgtgggtgagggtgtgtgggtgagggtgtgcgtgtgagggtgtgtgggtgagggtgtgcgggtgagggtgggggtctgcggctgggggtgtgtgggtgggggtgtgtgggtgtgggtgagggtgtgtgggtaggggtgtgtgggtaggggtgggtgggttagggtgtgagtgctgtttggctcttctgggtggggctggatgaatgtttgggcaccggcagcagctgtcacatggcctggctgcaggtttgggacagaagccaggcaggtgggctgtgtcaggcacagctagaaactgtgccaaggaagcagaccagagcaggggccaagggaaacctctgccttagcagaagatactggggagacaggatcaatcagggaggtctttcaaggcacatggtgcttcatggagccagggcccgggacagggagggctgtaaccctggcttgcctgattggctgagcacagacagatagaagagggtgtgggcagcccgctaggtggatgcctaagtgaggaaggaatgggtggccaggtgactgagacccccaagaccaggaccccactgtcaggtctgtggcttccaaacgcctgtgggaagtgttcccctttggacactgagaccatcagcttcagcttcacacacttttccagacaaagtcccgtaggtaacctcaaaagtcacttctggccttccccagaggggaaaggagaggggtgcctgtggggaggtgaccctcagtgctggtggagggcacagcagagagactgcctgcatatgggaggcccccagcaaaccttgcccagacgtcacccctcatttgaggcaaactgtaaaattattacaatttaggccaggggcagtggcccatgcctgtaatcccagcactttgggaggccatggcagaaggattgtctgagcctgcagtgagctatgactacacccctgcacttcaacctggtcaacagaggaagacactgtatctaaaataaataggcttggcgtggtggctcactcctgtaatcccaacactttgggaggccgaggcaggtggatcacctgaggtgaggagtttgagaccggcatgatcaatatggtgaaacctcatctctactaaaaacacaaaaattagcaggtcgtggtggcccgtgcctgtaatcccagctactcaggaggctgaggcaggagaaatagcttgaacccaggaggcagaggttgcggtgagccaaggtcaggccactgcactccagcctgggcgacagagtgagaccccacctcaagaaaataaataagatgggaaagctatgttcctaacatttttcaaatgatagttcatactaaagaatgttaccaatactaatgcacaaagcattttataacttttagactattaataaaaggtaagacatgaaaactgaagtatttgtaatcatgcttaatactggaagttcctatacctgcaatgtagcagctaattatacaaaaatttaataaatgacaaaataaaattttgcaaacagatttgtaaaaaccagaaagatatttgtattggcaattaatgtaacataattaaaaataatttattatggtcatctgctaaatgctaattaatgtaaaatgttaaaagattattttaattatgacatcttaacttttaatggctttaaatattataaatataaaaaacgggtttctaaatttaaaagaagaatgactaaatttttcagaattatttcatatttcttgtcatacaacataagaacaccatccatgtttccttttagattaggaaccctcccttattatctcactgaaaggagaatgctggaaggtgctagtaagatgactgtctaaggactccagaactgaataaattgttttgtggcaatgcatgtcacttccctaactcaactggaaaaggagacaaaaacctagtgttttcaaccctcaagctagcaagaaaacacagcccaggtaagctcatctcttctccaatggagctggagtctactcaacaagaggcgaccatttagaatagaattgttcagaaatttgctaacaacaagcagccaacatagacacattctccttaaatctaaaattcccttttcccccactagggtgcctgaggggcatgtagcaaaagtgatcccaaccacaccacacaaactagccaggaaacctttttgccttcacacatctgagagtccgtgagaagccagagacaacacggaggcagcagaacaccaacagaagagtcccagcatcacttcctggccatagaagccctcctgagcagcaggcagaacagaatccgctatagcaatcagcctgccggagaagcctctgcccctgtggcctgaggttccagtttccccaggtgacaccatgggcaggtgggctgaagaagtgggaaggtcaaatcaactggcccagccaggatgcctctttgatgatacaagtgataccggtctaagcctcgcctcttccacaggggaaactaggtggcccaaagggtgcccagaggcaggggacctgccacagcagccaccctcctgagaggttccctttcttccccttggtgaactccctccaacacacagcttgccaggaaagcaccctgtgtcttacatggcgggatcccacgacaccaaaacccaggaaagaagccttttgtcccttaagggttatcacaaccaaaaacaaaatgatacacaaatagtaagcccctaaattctgttaagaacaaaacaatgctgccactcacacctggctcagatgccagcagaaggagggcaccctccagagactgcaggagaagggggaggactcctccttgccctggctgcacctccaccgtcactgaggcctgcagtacagaaccagcagcttcttacacaccccaggctgggccgggccccaaagctctcctacttccccttcctggcccctagactgctgctgctgccaccattagcaccgacgccaaaggaaccagcgctgctgtcaccctccatgcacctgcccaccctccaaggctcctaccacttggcctccacaggtaccctcctactgctcctgttgagctgccgtctccatcaccatggctgccacaaccataggagatgaatcacagagctgtgccatcttcaggctccaacctccagctcaccacaggggacacctccttcatcagcctggcttggagcagctgggcagacaatgccagaaaaacctacaacaggatgcagaaagtgacagtgttagagcctcaccttgtcatgctggccactgggtggctggggccagttttggcgaaggcactcacacccaccctccaaagtccagcctctccgcctagaccaagctggcctcctgacctggggtggggactggagacaccacagtgcccggggctccctggggagcaagaatagcagaaactcagacccagccagtcctccccacccaagtaccagttcccattcctgactcctccacccacaggaccctgagcccccgtggtgcccactactccatgcctggggctcccagatggactccacaacacagagcaagagggcaagggccgggtaaccatggtgggtgcgagggctctgtggtggtcagaggattgccgtgaaaactctgtgcaccctctgcactccaacacaagcagaagttgttcaccctctagagccttgagtccaggaagaggagaagggccccttcctcagaggccaccactgtcatggccacctccacaacctgctgctggcagcagcagtgcagcctccccccataccacccctaacctgccccccccaccacaagcttagcccccggattgtgcccacaacacacccagagactgctgcaggcagtgtaaccctgagcgcccccaaaccacccctggtggacacttgatagtgtccataacccatccctgccacgggtgttgcagcaccaaatagtgccccatcaaacccgcccccaacccggaccaaaagcagcacagccccagatagcaccccaaatctgctcctgtcgcgggcagtgaacgcccggggtactgcacccaaccaaccccccgaccccaccttcccctttcccccatggacaatgcaacatttgacagctcccctaaagcacccccgactgcctgccagttggcattgttgctgacattgtagctcatgatagctaacccaacctgccccctgcatcggccagtgcagcagctaataattcccctaaccccccactacccgccgctggcagtgcacgacagcgcacacaacctgcctccaaccgcctgccaccttaggcagtgtagaccctgatagcgcagtgaacctgccccactgccagcaattcaatgcccgatagcgccacccactagccccctgcggcaggcagtgcagacccaaaagcacaccaaacccactcccccaccaccccacaagtgggcagtgcagctgcagagagcgcacctaccctgccatctttctactactctaacagagatgcagtctccgttgccatcaccaaccgcaaccaggcgagccgtggtggccaaggctccagctgccagcattgggcacggtccccaccttctcctagacctctagttggtcaagagcaactccagctgccagccaccctcctacagctcaggctgcactcctaccgccccggctgccatcttactgctccagcctcccgcctaccactccggccatgatcttactgctccagcccccctcctaccgctcaggccgccctcctaccgctcaggccaccctcctaacactccagccacactgccatctctgttgccaccaccatccagagtgagacgagccacagtgttacaggctccagcctccagctcccccttctcctggtcctctaagccaggaacagagtagcttggctggagatactggagagcctaaactggcatgaggcctcctcagcatgcacatggggttacacacatggtttctgtactacatgttctgattgggtgggagaaaacctctaggccttctctgattggactttattttcatactctgattggttgtcctaagactttctttcatccaatcagaacatgataacaaagtccaatcagagtaggcctccgggctttctcttatccaatcctggaacgtgtagtccaggaaaggcatattcataacctcagtacataaatggtgctgaagaagagtcaggctattccaggttcttctgtatctgctcaccgagctgctccgagcccggcttagaggaccaggacagactggaggctgtagcctgtggcaccatggctggcctccctgcagttggtggtgacagagactgtagtgtggctggagcggtaggaaggggaaaatagttttgggatagatgaaagggtaaagagggtggttagtgccaaaaggaaaaaaggatggcgagctggagaaggcattgcataaagacggtgaggaaaagatgttgggaaaaaaaaaattgggggtagatggagggggaaaaacagtgtagtgaacaggagggacagaaggtttcacagaaagatggtagggaaaaagtttttgggtagatggaagggggtaagagagggtcgtgagtggggaacggggatgagcaggaaggagagaaggtttgcaaaaatacggtggggagagaagaaagggaaagaagactgtaagtaaaaagattttgagtagatggaggggggaaaagggtgacaagtggaaggagaaaagagggtgcagagagggagggggaagagagagtggcgagcaggagggagagaaggttttgtgaaaagacagtgaggagagaagcttttaggtagatggagagggaaaagagggtggccagtgggagaaggataaagagggtggcgaggaggaaagtgaaaaggttttgcgaaaagacgataggcagaaaagaaagtgtagaaagaaaagacagtgggtaaaaagtgtttgggtagatggagggagaaaagagggtggcaagtgggaggagaatagaaagtgtggccagagggagtggggaaagaggactgggaaaaaggcaatggggaaaatagttcggggtagatggaaggcaaaaagagggtggcaagcaggacagaggaaagaagagggtgagcgggaagcggggaaggctttgtgaaaaggtggcagggaaaaattggggaggtagatgggttaaaagagcatggtgagcaggagtagagaagaggctttgcaaaaagacggtgggaaaatgtttttggtagatggagaagggaaagggtggcaaggaggacgggagaaaaagacgatagggaaacagtttttgggtagatggaaggggaaagagagggtggcgagcagcaggagtggggagaaggctttgggaaaagatgagggaaatgtttttggggagatgaaggagcaaaagaggatgatgagagcgggagatggaaaaaaggctggccagggtgagggagaaaagacggtggggaaaagttttggggtagatgggtggggaaaacggaagtaagcggtaaagtatagaaggctttgcaaaaaggcagtggggaaaaatggtggggaaaaagttttgaggtagatggaggaagaaaaagggtggtgagagagggagccaaagatggtcagggaaaatattcctgttactgattttttaatactcttccactctgctcagaaaaaataactgatatgatttcagggtttttttgttttggtttggtttggtttggttttttgagacggagtcttgctctgttgcccaggctggagtgcagtggtgtgatcttggcaaactgccacctccacctccccggttcaagccattcttttgactcagcctcctgagtagctgggattacaggcatgcaccacgacgcccagctaattttgcatttttagttctaaatggggtttctccatgttggtcaggctggtcctgacctctgttgattggcccacctctgccttccaaagtgctgggattacaggtttgagccactgcacctggcaaggatgttgaattttattgaatgtttttttctgcatctattgagataatcatatgatttttgttttaaattctgtttatatggtaaatcacatttattgatttgcatatgttaaatagtccttgcatcccaggaataaaacccatgtaatcatgatgaattacatctttgatatgctgatggatttggtttgctagcattttgttgaggatatttgcatctatgttcatcagatattggcctgtagtttgttgttgttgtttccttgctagattttagtgtcaggatgatactggttttgtagaatgagttagagaggaattccttctcctcaatgttttagaatggttgcagtaagattgataccatctatttttttgtatgcttggtaaaattcagctgtgaattcatctagtcctgggcttctcctgcctgataaatatttttattacaagttcaatttcataattaactactggtctgttcagatttttttaaatttatagagaaaaaatatttatttggtttatagttgtgcaggcagtagaagcatgggaccagcacctgctcaggtttgggtgagacctcagaaagcatccaatcacagaggaaggcaaagtgagggccagtgtatcacgtgtcaagagagaaatgaatagcaagaaggggaacatggcaggctattttaaacaaccagctctcgtgtgacacaacagagcaaggactcgctcatcaccaaggggatggagctaagcaaattatgaagggtccacccccatgattcaacaccttccactaggcccaccaccaacgtttaagatcacattcagcaagagatttggagggtaaacacatccaaacaatgtcatttcacccctatgccccccaaatctcatgaccttctcatattgcacaatacaattatcctctctcagtagtccccaaaaatctcaagctgtttcagcatcaactcaaaagtccgaaatctcatctgagcttcaaggtacgttcctccatctgtgagcctataagatcaaaaccaagttatttgcttccaatattcaatgcagtacaggtgttgggtaaatattccaattcccaaatggcaaagttgggcaaaagaaaggggcaacagacctcaggcaaatcggaaacccagtagggcaaatattaaaccttcaagctccaaaataattcttgagttcatgtcccgcatccagggcacacttgtgcaaggggtgggttcccaagaccttatgcagctctgcctctgtggctttgcagtgtacagtcaccatggctgctgtcttggatcagagttgagtgcctgtggtatttctaggctcaggatgaaagcttcccgtggctctaccattcagggatcttgacgtggcggccccattcccacagctcctgtaggtagtgccccagtggggactctgtgtggaggcttcaatcccatatttcctgttggcactgccctagtggacttttgatttctttctgattcagtcttggaaggttgtgtgtttccaggaatttatccattttctctaggttttctagtttatgcacacaaagatattctgaggatctttttttgtgtcagtggtatcctttgcaatgtctcatttgtaatttttgattgtgcttattggaatcttcttttttcttgtataatctaactagcaatctatcatttttatgtgtccttgcaaagaaccaactttttaattttgctgattccttgtatggtttttttggtcccaatttcattaacttattctctaacctttgttatttccttctactagctttgggtttggtttgttcttttctagtgtgtttggctattttagcttgttaatttgagatctttctctctttttatgtaggcatttagtgttataaactctcctcttaacattgttttttctgtatcccagacgttttggtatgttatgtttctattttcatttgtttcaggaatttctttaaatttctgccttaattctgttatttacacaaaagtccttcaggagcagattgtttagtttccatgtacctctgtggttctgagagttcttgatattgacttctaattttattccacagtggtccgagaagatacttaatatagttgtgatttttaaaaatttactgaggcttattttatgactgagcatgtggtcaattttagagaatgttccatgtgcaaatgagaaaaatgtacattctgtggtttctgcatggagtattctgtagatatctattaggtctgtttggtcaagggcccaatttgagtccacagtttcattgttagttttctgcctaataatctgcctaactaatctgcttactgctgtcggtggggtgttgaagtcctccatgattattgtacagctgtgtatctcttttcttaggtctagtaatatttattctaaaaatctgggtgctctaatgttggctgcatatatatttaagacagttaagtcttctcgttgaattgaacactccatcattatataatgtcattctttgtatttctttttactgttgttagtttaatgtctgttttatctgatacaagaatagcaatacctctccttttttgtttttcatttatgtgatgaatatttttccatccatttactttgagcctgttggtatcattacacatgagatgggtctctcaaaggcagcagaagtgtcttctttttttatccagtttgccactttgtgtctattcagtggagcatttcagccatttacattcaagcttaatattgatgtgttaggttttcttccttttatagcgttagctagttaccttgtagtctcaattgtttaattgctttataggttctgtacattttgtattcatgtatgcttttatggtagcaagtatcattcttttattttcacgagccaaactcctttaaacatttcttttagagtcagtctggaggtaacgacttcctttggcattttcttgtctggaaataccttattttcctttctttatgaagctcagtctggcaggttatgaaattcttgcatggctgggtgcagtggctcccacctgtaatcctagcactttgggaggccaaggcaggcagatcacctgaggtcaggagttcaagaccagcctggccaacatgaagaaactccctctctattaaaaataccaaaatttgccaggtgtggtggcgcacacctgcaatcccagctactggtgaggctgaggcaggagaattgcttgaatccaggaagcagaggttgcagtgagctgacatcacaccactgcactccagccggggtggcaaagtgagactctgtctccaaaaacaagaaattattggatggcatttttttttctttaagaagactaacgctaggccccaatcttttctaggttgcagggtttctgctgataagtcagttgttaatctaatttactttataggtaatttggccctttgtttgagcccatcgtctgggaggtgaggaacgcctctgcccggccaccttgtctgggaagtggggagcccctctgcccggccgccccatctgggaggtgaggagtgcctctgcccggccacccaatgtctgggaggtgaggagcgcctcttcccagctgccccgtctgggaggtgaggagcgcctctgcccggccgccccatctgggttgtgaggagtgcctctgcccggccactctgcccggccgccccgtctgggaagtggggagtgcctctgcctggccaccccatccaggatgtgaggaacgcccctgtccggccaccaccccatctgggaagtgtggagcacctctgctgggccgccccatctgggaggtgaggagcacctctgcccagccgccccatctgggaggtgaggagcgcctctgcccggccaccccgtctgggaggtgaggagcacctctgcccagccgccccatctgggaggtgaggagcgcctctgcccagccaccccgtctgggaggtgaggagcacctctgcccagccgccccatctgggaggtgaggagcgcctctgcccggccaccccgtctgggaggtgaggagcgcctctgcccggccaccccatctgggaagtgtggagcgcctctgcctggccgccccatctgggaggtgaggagcgcctctgcccggccaccccgtctgggaggtgaggagcacctctgcccagccgccccatctgggaggtgaggagtgcctctgcctggccgcccatcatcttggaggtgaggagttcctcttgccggccgcccagtctggcagttgaggagcgcctctgcccggccacccgctctgggaagtgaggagcgcctctgcctggcagccccgtctgggaagtgaggagcgccactgcctggctgccccgtctgggttgtgaggagcgcctctgcccgactgccaccccatctgggaagtggggagcacctctgcccagctgccccgcctgggaagtgaggagcacctttctccggctgcccatcatctgggaggtgaggagcacctctgcatggatgacacaccatctgggaagtgaggagtgcctctgcctggccacccattgtctgggaggtgaggagtgcctctgcccggccaccctgtctgggttgtgaggagcacctctgcccggctcccaccctgtctgggaagtggggagcgcctcttccgggttgccccatctgggaggtgaggagtgcctccttccagctgcccatcatctgggaggtgaggagtgcctctgaacagacgacacacaatctgggaactgaggggcgcctctgcctggctgcgccatctgggaagtgaagagcgcctctgcccagctgccccgtctgggaggtgaggagcgcctctgcctgacctccgccccatctgggaattggggagtgccatttctcagccgccccatctgggaagtgaggagcacctttctctggctgccaatcatctgggaggtgagaagcgcctcttcacggatgacacaccatctgggaagtgaggagcacctctgcctggccgccccatctgggaagtgaggagcacctcttcctggtctccccatctgggaggtgaggagcgcctctgcccggccaccccatctgggaggcgaggagcgcctctgcctggccgcccagtctgggaggtgaggagcgcctttgcccagctgcccatcgtctgggaggtgaggagcgcctctgccaggctgccccatctgggaggtgaggagtgcctctgcccagctgccccgtctgggaagtggggagcacctctgcctggccgcgatgtctgggaggtgaggagtgcctctgcctggccgccccacctgggaggtgaggagtgcctctgcccggccgccccctctgggaagtcaggagaccctctgcccagccgccccgtctgggaagtgaggagcacctctgcccagctgccccatctgggaagtgtggagcacctctgcccggccgcccatcgtctgggatgtgagaggagtgcctctgcctggctgcccttcgtctggtaggtgaggagtgcctcttcccagccgccccatctgggaaatgaggagcacctcttgcctggttgccccatctgggaagtgaggagtgcctctgcccagctgccccatctgggaagtgaggagcgcctctgcctggccgttgtgcaatcttccaagtgtgaagtgacagcctttctgcaggtgtacccaacagcttcgaagagacagccaccatcgggaacggaccatgatgacgatggcggttttgtcaaaaagaaaagagggaaatgtggggaaaagaaagagagatcagattgttactgtgtctgtgtagaaagaagtagacataggagactccattttcttctgtactaagagaaattcttctgccttgggatgctgttaatctataaccttacccccaaccccgtgctctctgaaacaagtgctgtgtcaactcagggttaaatggattaagggcggtgcaagatgggctttgttaaacagatgcttgaaggcagcatgctcgttaagagtcatcaccactccctaatctcaactgcccagggacacaaacactatggaaggctgcagggacctctgcctaggaaaaccagagacctttgttcatgtgtttatctgctgaccttctctccactattatcctatgaccctgccacatccccctctccaagaaacacccaagaatgatcaataaataataataaaagaaagcatagtgcatcaccccaagggtagagcgtgtgtgtgtgtgtgtgtgtgtgtgtgtgtgtgtgttcgtggatagtttctcctagctaaccataagacaggaacttggagtcttgggacaggaagagagaaaagaggggagaagtatcctgaaccaagtatagagttgtcaatctcttaactagaaggttcaatagttgggatttatttccacaaaacaaggaaatttgtgtttttataagtacataaaagtgttcctgtctgtctaggcttgtacttaaatgggagactataaactctattgtccagtattttactgaaaactgtgtatgacactctacagtccattgtgacattcctacagccaagaaaaataactgaaaacactgaacgtgtcagggatccatgataaggattcatttctggagcaaagactggtcttgtgaagaaaggacctgtccccttctcatgcatgggattctacccccatcccacacaccagaagcactgccaggacatctctgcactatgctgtgaagtgggtggtttagggtaccattgttatatgacttttatcattttagttctgtacatcctatcttgggaagtaaatttttggttatttcttttcattttgccttttcttcttgtttaactttaaaatggaaaaagaagcaaatgttcacaataaactttactgtttaatctgaaaaaaaaagaaaaacattgcagaatgacagccacagttttaaaaataagcacattataaagataataaaattgtaataaaactaattataatgaacatataaaagaagtcttcccgtggatagtagtatcataaaacaatttatattatttaaccagttatagactcactgttggcatgttacatttaacacacacttgacttttgatttgaaatcatttcctcattaaatcctgtatctcacctttgagattaatgtgataatgtgatgtagcctctattgatgcctcagagagtgagaacgtgatgtaacctttagtgaagcctcacactgtttattaagatcagccaattttttttgaagttgtctcacaatgacctgacaagacatttttttgattttgtgaatcatcttatcaaattaacaatatttactttcaaaaatatccccaaatatattgattcagtttattttcttcatttgtgcacattgctgcttgttagtgaatttacttaaggacacaagaaggtgcaatctttctgccaaattggtactgtcttactagacacaagattcatctcactagtaattttttcccttaatgaatctgtagttcttcacaacttactgaagtctcaaaaaaaaaaggcaggactagtggtggtaaattctacacagtggaattctttccttcttctgtattagaagcacaaatcaacatcaaagttcctcacatattcaatcacctgctgaaaattttccaatagatttttatctcagaataaaagtaattttatttcaaactttacaggcccttggtaacctggtctccacatccctcctgacctcagctcctatgtttctctcctctactcacttcttttgtactatacatgaaccctgccaccccttatgaattgaaaaatggggatccaatgcaaagctaataaatcacagatagctacaatcatctttctgtgggacaaagttctatccacatgatagtttttgagccttgaaatagaaattatgagcaaatgatttgtaacaatattcaaaataaattatgaataccagtggggtgattaaatcaaatttgatattgctaaaatccactacatttgtcctaaggtattatttaacaaaacacagatgcctttaaaaaattgaggttttaacaatacataatttcagattcaaatatgttcagattaagtcaaattgacataaatgaaaataaaattctaccaactaaaatatataaaaagctactaaaaaagtgttattacaagatgcagaaatgtacacttcaaaatatacttcaaatacacttctgttcctctggaaaatttagaattaactgtcaatgtaaattgctgaactgaatcttaatttcaaaatactaattgctgatatgggcattcccatttttctgcttcattgtagtcaaaaaatgtggccacaaagagacattaaaacctttatttcagcagtataagccaatgtcattaatgttaatctattaaaaatctttaacttaaactcttataatttcatcagtgacacaatgcctttactcaaagtaaaacgtctcttagctttcaatttggtggaaatgaggcatgtttctaagctgatatagtaagtacatttatcatctatttatacatatatatatacacacatatatatgtgtgtatatatatatacacacacatatatatatatatgtgtgtgtgtgtgtgtgtgtgtgtgtgtgtatatatatatattcaactagattcagcatttagccaaggccattttctttcaggaaggttgaaaagtatttatattttttgatacttacttctctttctgctttctctttttcatattgatctatacattcttttaaatggttaccataattgaatacctcctcatttttctcttttagatgacgttgcattttcgtctcaggaaactgaatattaattgttaccttgcttttgttaactttcttatgtgcataaactaattgctgtcgaagccacctatttttgctttctagtttaaataatttctgctccagagactcctgctgttcagtgtgtttgtccacattatcttgttcattttgatacatgtgttcagctttcttcatttgacactgtgtttcacatcggtctctttgtgcatgttccgaaaccaatgcattttctcttagatcatctcctgcataattgagattaatttttgggcttttggatttcctttgagcttcataaagtggttgatggagcacctcattgttatatattgtattactcacatcaacattcattattccttgcaaatgagcatctcctgcactgtggaaagcaagttcttggttttttcttgatgtgacactttgatcatggtcttgtaaagcagaagccagtctaggatggtgtgattcaatttctgtctccagtatttctttgtcttgtttttccttcaatttagaagtcagcatcgtgttctctgctgtcagaactttaagctgctctctatactgagatgccctttttgttaatgttttctgtttcagttttagggtcatttgaagttcagcattcttttcttgtaaaatcttaatgtcctcaaagtatttattttccttcacctggtgttgacgtttcagtgtggctacttccagttttagcatggcaatttcctttttcaacatgcaattttcatgaaagagatcattttcactttcatgagtgtgagaaacctaaataaaacaaaataaacatttaactagcactcagtaaaatggcatatcatagttcctctgaaattaaagaataacttgtacgtttatacaatgaaagggtttttataagtaggtatcagttgaagaaccattgaatcaaaacttcaaatgctatagagcataaattccccaaagttcaaacatttatttggagacaacgaattcatgaaagtaaaagagaaatgactagagaatttttaagagcctcagaattgaaaaaaaaactttccctgaattacaacaagctcaaaagcataaaataaaagattaatcaatttgactacatacgaaaattgggtttacactctgatgtctaacctatacaagatcccatactaagagccttagtgctacatatatttagacagataaaatttctggaagctctttcagttcctttttcctgagaatattctctagatattctgtttttctaaaaaatatagttaattgtgagaattatatttatgaatgtttgataagttgagacattgtaacaagcacttttagttatcacaattctgaaaggaaaagattaaaaatataatcaagttgtaggattttctccaagtcttctgagtctacatccaggacttctccaccaaatctcagttaattctactgggtaaatatgtaaatataaaagaagtcttctatctcaaaacaaaagtggtaaagaagataaaatctagacagccctacttagaaaaccatgagcttatttactactacactaacttttgcttcctcttgataatgtttgagtcagtattaaatgttaactaggaaaaatacactaaactatgttgctaggaataaaatacttaccaataaattatcactaagtatatggtagggattatcattattttcaaaagctctttgtactgaaataagatactatttgcatgccataatttataataaataactgtagctacaaaagttatagttaattttaagacaatacttttgtttgatttagacctgaataacacatactaaatcaaagggatgttaaaagtaatactgatgaaataaagtcagaaatataaaatttttgccagagattgatttacctgattcaaattacttgttacacttttcaattctatatcttgtattctgagagcctgttcaagttgttgtttcacttctaactttttcctaagttgctcttcaggtctaattttttcttttaatatatcgacatctcttctcttcttcttgatttaaagtcaatctgccattaaacatacttatcttaaaattcattttgttagaaaatagaattcactttgagatctacttcttcctatactggtttattattccaataaaattcctatattcctgaatttttttttctttctatttctctggtattcattactctgtaacctcttccaaatgacatacatacttgaaaaatagtgagaaaaaacttcttctagttagaaagtttctgttactagtaactttgacaactgttatggaaaagaatattggaagctatctagtaaatttataagttgaaaattagtttttaaaaaatcacacagtcaaaattactcctcaatgaggacaaatcatttagagttaactgattaaagtgacattactttttatgaaaaaggtttacagatttattagacataaatatttctacttataaaatatggcaaatatccctaaaaataatttgaatattataatctcagactagattaaagagtctaatatgtgtcatcccatatgccttttgtttctttttgagtaagacttaaacatatcttgttgagtattatatatttttcaacaaattttaaatctcctttagaacaagagtgtaaacatttaattaaagaataaaaataatatgtatttttaacctagaactctgaattaattttatttatgtaggagagcgagagatgttgaataaactaatcataaattatattttctttatattccatgcacattaagattaaaagtgtataattaaaggaaattgattcttggagagagaagaatggccgtttcacactctctttattgaactgtaaatgaatataaattttcttgagaacaatttagaagtaatgaacaaagaactttttaaaaacttcctataatttaactaaatatttctatattgaagaatttattccaagtcaataattagaaaggtaaaaaagatttacatgcagttatgcgttgtagcatttataatacaaacaattaaaaatcaaaaaaattaatttgttaagtaatggtatttccaaataatggccttctatatagccattaaaattgtgatttaaataaatatgcattaattatcagtggaagtattcacatttaagaacttttattatttaaaagaatttgacactctacaagacagatttttttctccagttaaatctcagaatgtaagtcagcttttacaaaaagtttcctacatacttttagtataaatagttgaaatatttatttaaaactaggatgtcatacctcacactgcagagctcttgttcccatttagctttttggttctctaactgtgattttatttcttttgcttctgacagttccttttgtagtacacaaaacttattttttgtttgttccatttttgctgtaatttgttcacagtgatcttttttaagttcccttcctctttcacaagaaggaactgcatccaagatttttgatagggtagttgaatctgtctcaaggaggagatagaaataaaatatattagtacttttgggatataaagggctgcatattttaacaatcactaactcacacactcaacaaatatatattgattgcctaccatgtggaaggcattatactaagctctgcagattaaacagaaaaaaaaactctgctcttgtttagcttaaaatatactgaaaagcaaagccccagaaaagttacaattataaattcagatagatactgtaaaaaaatagattgctaagaataggatctgtactaggcccacggaaaattcccccgaggaatgtatggctacactgaggaacaaagattgaaaaggaagcagttgagcaaggggggaataaaagcattttagccagtgtgtggcatgtgctgaagctctagtgtagtctgcctccagccaagagagaacaacaggtattgatttttcttcttagctaaaataactaaaaataaaatacacaaaatacactaaacaattttttagacagtggacattaggcaaagaagatgatagtccctgaaaaacagaaaaaaaaagtggaaagcaaaccttaatgaatgtttcagcttcttgccttgacagagattccaagacctgacacaggaaacaaaaactgaggtggaacctaccagactctcttggttacagtgataaagcttagagtctggtaaaaccaaaggagacagacaatatagaacagaacactgaggaggagacagagatacagaaacaaaagcaagaaacccctggaaattgcctcccagtatttagcaaaataatgaagattgcatgtaagccagaaactacctaagaccaagccaggtcagggcggaacttataaaattagagaaaatcacacctggtgctcacatagtgccaagaagagtgtctatttttatatatttacctgggaagactcagacttcacaggaaaatgaatagtctgaaaggccttgcctcaggtgtggggagtcagctcataaaaagcaaaaatgaaaaggatcaagctgtttataagtaactcaactctattctacaataaaaatcaagaagataagtaaagcaatagaagatacttttaaaaactaaattgcacttctagagatacaagttacaatgctgcagatgaaagctacactgagtagatatgagcatagattgatttgccatcatgaaagaaaagattcacaaatttgagatactagagaactatgagcaaactcccagcaggtaatatgtaagtccacaaagaggtagaaggagagacagaaaaaacatctgaggaaaaattggctaaatatattctaaacttaacaaatgctacaatcccacagatccaggctggtatctggctggaagtgaagaaatgaaaatatatgattggaatttcttataccatctatgatatgatataatataacttgaaggtgagttgtgatgaggtaaatccatacactataaatcctaaaacaaccactaagacagcaaagcaaagttatacctaatagccaaataaacttataccacaaaaagatatgactaaatcatgaagaaatatacaaccagatcaataactaaaaaacattatacctatatatatatatatatatatatatatatacatataaaactaaattataaaaattactaaactagtctgaaggaagcaataaaagaacaaaacaaagcaaagaagatctgggactaacagaaatcaaacagcatggtgacagacaacttttatcacatcaataattacattataaattaaactggtctaaaaacctctgctcaaaggcagattgtcagaacggatataaaagtgagatctacctgtataacacctataagaaataaactttaaatataaagacaaaaattggttaaagatgaaacaagatataccaccctaacgcttgaaaaaagaaggctgaggaagactggttgtattaatatcaaagtacatttcatagcaaaaacattaccagcaataaacaaggtgattttatagtgacaaagggttcacttaatcaagaaaacataagtcctaaatatttatgtagataataacataaatgcttcaaaatacatgatacaaaaatagatagaactgcaaaagaaatggacaaatgcctaagtatagtctaaaatttctaaaccccttgctcaagtggtagaataaggaggcagaaaatcagcaagaatatggtagacttaacaccattcttcagaagtactcaaggactatattctagattatatcttagtaaaaggattaagaaggatttaagtcatacaaaacatgttacctgacccaaaagcaatcaaattaaaaatcaataataaaaatgtacctgaaacaactcaactattggaaattaagtaacataacatccaaataaccctgggttggttccaaaaatagtaaaaagaaaaattagaaagtattttgaactaacttcaaatgaaaacacagcacattagatattgtaaaatgcatctacaacagcacttaaataaaactttccagcattgaatgtctacattagaagactctcaagtaaataacttcgacttttacctgaagaaactaaaaaaaaaaaaaaagaaagtaaattcaatggaagcagaggaaaggatacatattcgtattggtttgaatgtctttgtccttgcaattttcatatgccaaaatgaaatcacagaggtgatgttattaggaggtaggagtttttggatgtaattaggtcatgagggccacccttcataaatggattaatgctctgacagaaataaccccagagagcctctttaccctttctgccatgtgagggcacagggaaaaagaatgcatcaatgaatcatgaagtggtacctcttcagacatcaaatctgatgataccttgatcttgaactgtgcagcttccaaaattgtgagaattcaatttatgttgttgataagctcccaactatagattttttaaatactaggcaaagagaactaaaacatcagagatggaactaataaaacacaaaaatgatggaagagttgaaaaataccaaacactttgagaggatcaataaaagcaaaagtctatctagccaaactagctcttgaaaagagaaagctacaattactaactttggaaatgagttaatgtgacattattttagattctacagatacttaaaaatacaaggtaatattataaaatttatgtgaataaacatgacaacttagacaaaatggacaaattcattgaaatgtgaaaattaccctctgatctttgacaaaactggaaaaaaagcaatgtgaaagaattccctatttaataaatgatgttgggaaaactggctggccatatgcagaaaactgaaagttgaccacttccttacaccttatacaaaaattaactcaagatggattaaagacttaaatgttagacctaaaaccataaaaagcctagaagaaatcctaggcaataccattcaggacataggcatgggcaaatacttcagaactaaaacatcaaaagcaatggcaacaaaagctaaaattgacaaatgggacctaattaaactaaagagcttcagcatagcaaaagaaactaccatcagagtgaacaaaatgaacaggcaacctacagaatgggagaaaatttcggcaatctatccatctgacaaagggctaaatccagaatgtacaagaacttaaacaagttttaaaaaaaaaatcgaacaaccccatcaaaaagtgggtgaaggatatgaacagacacttctgaaaagaagacatttatgcagccaacagacacgtgaaaaaaatgctcatcatcactggccatcagagaaatgcaaatcaaaaccacaatgagataccatctcacaccagttagaatggcgatcattaaaaagtcaggaaacaacaggtgctggagaggctgtggagaaataggaacactttcacactgctggtgggagtgtaaactcgctcaaccattgtggaagacagtgtggcgattcttcaaggatctggaaccagaaataccatttgatccagcgatcccattaccggatatatacccaaaggattataaatgatgctactataaagacacacgcacacatatgtttattgtggcactatttacaatagcaaaggcttggaagcaacccaaatgcccatcaatgatagactggattaagaaaatgtggcatatatgtaccatgaagttcatatgtactatgaagtctatactgcactgtttcagggaaataatgtgttacaacagcatagctttaatggtccataggtcacagttttcacttttattaaagtagatgattgtacatagtgatacttgaaatattttagtttcagtttctaatatatcaaaaatcagtaggtaaaaaccaacttaaatgaagactgatatctcatttatttttattttcatatatttgttttttgcataaacaaactttaattagttgtggtgcagttatataatggaattctataaagaacctaatataaacaaaaccaaagttaattctacacattatggatggatctaacaatataatgctgatcaaacaaagaatgttacagaaaattacacaatgtacaattatttacatattagcagttgaaaacaaattctacatattatctatgaccatgcacatatgtcgtataatgtttaagcatgcataggaataatataaaaaaccagtttagacaattgtttacctctaaaccatgaaaagacacaaagccaaatgcttcagaatcacagttttaccaaaatgatcataaagaaatgattacttctcccatttattattattattattatttctgtttgtttgtttgtttgtttttgagacggagtctcgctctgtcccctaggctggagtgcagtggcgccatctcggctcactgcaagctccgcctccagggttcacgccattctcctgcctcagcctcccgagtagctgggacttacttctctcagtttttaaaaattaagggtaccacacacaaacacacatatgcatgcacacaggcacaaacgtgcacaccacatacacatacacacacacacacacacacacacacacacacagaaagtaagctaatcagaacaacagatttccttaggatgcttcaaatgactacagtcccatgaggtaaccaatgttaaaacacaattggcatgtcaaaattgaagctttccctgcagtaaagggtagaatttgaatcaatttttgaacagaaaaaatattagagtttaaaaatacaccttcttgaatctttaagtcatacagacattcccaatacaaaacattacagtatgaggacatgaaagcagaaacacctgaaattaaagctactttttaaaaaaactaattaaaattcgtgttcttgtaagtaatcagtttttcaaatgtggataccactattgacattattaactcaaatatttccataatatttgaaaaataaacattggggagatgagactattaatatgtcaactattgaaatattcattttaatatagttgaactgtaaaattaacctgctctcaatgtttgtttattcttccattctaagcctttatttggaacagagttttgcatttcagtggcaggctaaacgggtttggaagaaaaatgattaataacgaatgtgtacttcacaaaatacatagttaataaataatgcaagataaaattataaaactcaatacctcaaagtgagaaggcttttcaggagactctaaaaagcaaaagagatttattatcggtcataagtaaatatgacaaaatcagccacaaatgaatccagtgatagtatctaactaagtcctttttctcagctttgagaatgactcctttaggtttagggggttttctttcggtatgtttctttaggacactcacatgacagaaatacactgaagaaactaggaatctaggcttcatcaaacatgcacgtaagacttcaaaagtgagaatgtgttgtgcatgcaaaatgtgttgatattaatatgtatatgctgagtgatgaaaagagaaatgatctttgatcagaggagcaaattatgacccagaaaaaataaatgtcaaagctgaatatagaatcctacaccatatattcagtgaaatacactggaataatttatatcattacattaatcatgttctttaatttgtcctacaattgagatggtacaccgttatgatgagagttcagctgaatgcagaactgacatctcatcactgaacatgttacaaattgatcagcttggatatttacttaatggataatactaaataaaatattcattgtttcccatatccttgcagtgtaatcatatgcctacattgctgtatcttctagtttatcctcagaaattttcttgattcactcatgcaaaaaatactataaaactcattaaaaaaattgtatagtgagctttcaatattgatatgtttatttgaaaatttatggcaacatacttatcacatataaataacattttatatttttaaatcagacaatatttattttaaaaaacaattttagaattcaagtaataaattctgtaattttttgtttctaaaaattagttggctttgtttattatggtaagtgtctaatagatttttatagaacaacaattttaccaaaacaatttgcttcattaaacataaagccaatgctcttagattcaaatatctctcatttgaatagctaatatcaacaaaatataaacattttatgcctgatagtaatagagaaaactaatgagtcaccatggtttactccaattctagtaatcctcctgcttccggtagtctctggagtacccacaatctaatcttctggagtgcaaatattgtaaatgcaactgaagtgaattcactcaaatttccttttcagaaactccaaagttggctggctatattctttcttgctgcgtttcatgcctcacaatccctcttccttagccaaaataatgtctacatctgtggtcttgattcttcccattcaacatcttttaaaatcaattttcccaacactttctttctctttgattagggtagtatctgacatctgtaattactatttctttacctcttttttcccctctggtcagaaacatactcagaaataaaagcaatataatgctttctcttgaccctgctatgtcttgaacttctatccaactgcccttcttccagatttttccaaaggaaaggctgttcccttgctacttaagagtgaggtccaaggaccaccagcaacagcatcacttgagaatttattaaaaatgccagaatcccaagtctgctgagtcacagcgtgcattgttaacaaggtattcagctgattttctaaagtgtgaaaacttctcgtctatactgagagtatataacaaattatatacacgcatggctgtgcaaatatgcttatattcacatactgcagataaaacacaactctccatggtcaggtgcttccatccctaatgccttcccaccggtgagaaagataagaccgacaacatgtttgctgtaattctctgccaaattttggtaatggaaggtcactttatattcttcccagctttctaaccatgctctatctttctctaaagagttattttattttaccattctccattatgtaaacctgctttttgttccctcatgtactccctgtactctctgtcttcctcagtcttcattccttgttttactcctttcctcaggtcttagagtatgttgaatttaaactaataattcagctcttttttggcactctcaatataatctgttgccaacacctgagaagacacataactttcactgcctttgttcttccatgttatgcatttaaaaaataattttctctggctgtcagagtatatcagtcctcatgctttgagacaaacatttggacaaaagatgttttaaataaaaaatggttcttaccttctattttgccatttgttgtctttatttctttttgatatgtagcctaagtaaacactcataattctgtgtatcactcacagagataatctgttaaagataatattaataatttctttttttactatttttttattttgtttttctgagatgaagcctcgcagtgttgcccagtggcatgatcttggctcattgcaacctccggctccaaagaccaagtaattatcctgcctccgtgtcccgagtagctgggactacaggcatgagctaccacacctggctaaatttttgtatttttaatagagacaggtttcaccatgttggctaggctggtctcaaactcctgacttcaagtgatctgcccacctcgccctccgaaaatactgggattacaggtgtgagccaccacagcctgcctcaataaataatttcaatttaaaaataataatgacaagcatcacattttttattaaaaatcttttttaaaacacattttttaactttaaaggcaattagatttaaggctgttcacatactgaaaaccaaaacatttcaagagaaaacctcaaatatgctctgtagattacgcttatcttttattttcatgtggctattgactaggttactgagcaaggaaaataatcatattcgcaaaaaaattcactcgtgcatattttaaaaggaatttacttcaaagtatctgccttacactgtagtcctcaccaaaaacaataggacatttcaaacaaaatacaatatgattcaacatttgacatatgcataattatagatttttttggttaaaaactatgcatggcatgaagagaattttcagagtatgtcgtgcgaagtaggaatagaactctgttaaaagctgtttcatttaggaaaacaagggcataaaataatgaaaataattttacatcttttttgctgatacagaactgcttgaataaaaggaaagattcttaaggaaaatttatatttatgttatttttaaatgaaaacaagcaatcattagataaagtatgcaattcgttcttaaggcataacttcagaaaagtagagcaagccttcatataaagagaaaaataaaaacatgtattcgtgaaacatctaacatgtgacagacacatatttgcagacttttcttcaccttagaataatgaggataacgatgacattggtggttaccccactttctgtatcctagtcattctaggttgttaagaacaaaatgatgaacaaatatggtccactgccctctctgttcagaagtcttcctcctagactttcatatggcatactcctcatctttgagacgggagattaaatggcagttgcagaaagatctactctgaccatggaattccactgccactcccatacgcgtgctaattataaagttcttcaattttctcttaaggaacattctctgttttgttttaaagaaaaagttacagtaatttgtaagtgtttttcatttgttattctcttcctactactgcagcataatctttcatcttggatattcagagactcactgcctagtacacagctggtactcagaaagaaattactccaggtcaaaacattgaaaatctcatcaggaaagtctcactttccaaactgctatatttctatggaaaatctgcagtagtagcctgctgaaagttaccatccccttacccaaaattagaaatccacatgcctgttcttacttcccattcttgtgctaacaatactgctttcacataaatgccactttgaacattttgtcttacatttgtatacagactttccagtttaaaaaatgttttcacatttgttacaacattatttcttcacatgcacctaagaggtagatatgagcgctatttttataaacaaagttactggtatttgattagattaattgattttttttccaagttcccatagctagtaagtgacagaaccaaatacagacttatcttttgacatccactcattgctgttaccactatgcagctgctgcttctgcctaactggtgaggcctttgctatctcttccacatccacagttgtgaccttggaatacatcattattatttgatacctatgtggctgcaaacatggctgccataaatggactcaaagagttctatttgtggaaaaaagtccacttattaaaatactactcaaccaaattgttgttattatagttttacaggtgtcctatttctcatgtttatccaactcctgaaatgttccttcagatctatactggataatcaaaatatgccaatactttcagagtcccaggaattatcttttcaagttccaagttgagtaagactaagactacagtttaaactctttctcctcgaatccagttagagcttttgtacatctagatatacacagaatcatacagttttgcccataaatgaatgtggagacatcatttagtttttagacaaacttaacttcagaactcaagtagattcctaatgccttctaagccttattttgttttgcactactctacaatggcttcaaaattaatcctgcaaattagcagaattgcactatgcagctgttatctacttggaacatgattataaagtatgttctgataaatgtcagaaaataatttctttttttttggtttgttttttgagatggagtctcgctctgttgcccatgctggaatgcagtggcatgatctgggctcactgcaagctccaccttctgggttcacgccattctcctgcctcagtctcctgagtagctgggactacaggtgcctgccaccatgcctggctaatttttttgtatttttagtagagacggggtttcaccatattagccaggatggtcacaatctcctgacctcgtgatccacctgccttatggacataatcagaggtgagagaataaagtcaaatcatctttttatgttttaagattactgagtacttaagttttaaaataacaacaacaacaacaatacacagtacctcagaatctgaagttgattttgtatcttcttttcttcctaattctgatgtgggcatcttatctacaaaatgttattcacagacatgtatatgagaatgtttattactgtaaatcataaaactatatacaaatctatttccatttatgagtatttcaaaaataaaaataatagcaaaaatagaatttcagaattgaagcaggttcagaaaaaaaagagttgatagtatgaagaaagatatcaaaatgtacttttttaagtagacattgtattttgggctaaaaaattgttttctatataacagcatttaaacacagaaaaattttcagagatattcactaacttaccacttctattattttggtataaaaaataaaattgtcattacttgtttgatcttgtggagctcgttcaataatgccaatatcacgttctcgttgtccagttactgtctttgttgctgcctcctattacaaacaaaacacagaaagcaaacacacacaaaaaaaacttcagaaaaaattgtatttattcactcaatcaatttgtcagaaagacaacaacaacaacaaaaaacatactttgtatctgtcaaatcatatgcactatcctgggagaagcagaaaatatacatggaagatacattctggcttatgttcaagaaatggtagagatatgtgaaaacaaataagaacaaaaagtaaaattcaccagttctacaatttaagtcaataaaatacataagggcacaaaggagagaaaaatcagttttacctgaaaagcttagaaaatgctgccataatggggccatattgggaaggacagacaaagtgcagagtcaggatacaaagactctaggtgcaatagcatgtgcaaaataataaggcatgaaacaacatggccactgagggatgccagagtgatgtggtaaaactggaacacagtcagagcaaatgagttaaagagataaaatgagaccaaaccatataagatatgtatcacgctagaatgtgaacttaccccttcatgtaatgggtatccactcaatatgcagatgagttacatcattacaagtatatttcagaaaggtgacccttccagtgatgtaaagatgaacatggggagatggggcaaaactagaaaggagtacttcaaaattataggtagagagttaattatggtaataagatatggaaaattataagaaggcagaaaatacaaaattaggtgtgtgactggatgggtgacatggagaagggttgaagtgcaggatgtaggggacggttgaagtgccggttgaagtgcttgagcatttcatggctacttcctaggtgttatttactaggatggggaaaccagatgacagagtagattacaaagagtcagaaaagagtcagaaaaaaataaaataatgttttcagtttgagacctataagatttgaggcatccatggggcttagaagaaagatctggataaagacatttggagtatgagtagatgacctacatgaggaaaattacatagtgattagaaaataaatatttgtaagatagactaaatgggtagaattaagcaacacaaatctatgcagactgctgaaattttgaaaatgaaatcaaaggagagagaaaaacatgggattaagtttctcagttatatatttccaaatttatttcaagaatataattttatttatataggtaaatatttatttctgaaatattttttgcaatatgcatctttgaattgaatgaaaacatttaattctaaaacaacaagattctgcaaaatgacctttataaaaaccttgaaatttttaactgtacaagagaaatgcttacccatagaattataaggcatttttaagtactactataaagtgagatagaaatgtgaaactgttttaaaattcacatgcttttcttatgctcctgcaaacaagataatgctagctcaaattgcctatttacaccatataggatggtagtttaaaactggagaaaagatctcatataaagaaaattaagcaacaattattcaagttgatgatttaatagtttttacgtatatctatgattgtcaagtagaattcagtattcacaggagaagtgaagaaagaaactaaaaagttcaagtcaacaagattcctgagttttagaaataaacaaatatatgtgcaaggtgtaatagttatgaagactaaagttaataaggcttcctggaaaaaatataaaatatccccattgcaagagatatttttaagtgtaaaaagtattcttccaatgataagtttgtttactctgttaaatcttcccttacgtatgattctatgataataggtactttactttaaaacaattgacaaatattgattacattcatttgatgtgtgcatgtaataccattacatacctatattatgagcaaaaatgtcagaatatttctagagattaataatttctacatttctttgacagtgttgtagcttaaaagtgattcttctcttttaggagacacagattaagaaccatgttcatatgatcagaaactttaattttaataacaagtttaaataaaatgtttatttatttatactctattatcaaaaatattcaaaatggctaccaagattatataaaagagtaagataagttaaataacctaagaatatgtcaaatattaagttagaaatcttaaaccagaaaccaaagaatcaaaaagtaataattcacaataaagttggcaaggcctaaaacagatttcactttgcattctacaaaattataagtacgactagattaaatataagacataaagttactaaaagaagtaagaattaaatttttgttccttgtttataatttttttgttgacacactataaatgtacgttttgggggtacatatcatcacttaatacattcacataatcaaatcagaataattgagatattaatcaccttaagtatttatctttcctttatgctagaaacattcaaattattctctactaggtattttaaagagtacaacaaattgctcctacctatactcgtccttatattttctgtcagctttttattaaaatcagctataagtcactcaaaaacacctgagctatcttttattagctggctatgttttcttaatttttattttaaataatttacatcatatcttttattctagagagttcctgctctcatttaaaccactatttttgctgtgtttttataagaatctgtctcatcctctctcatgtagtctctgtgtttatcttacccttcttcaacgaattatttcctattatccccttcatctaatttattattatacaaatatggtggtatccattatttttttaaacaaaattacctacgacaaaaatttattcttacacagtttatagtactgtagaaataattaaaattttaaaattacatgttatattttgaaatatctcttcacaatttacagttgtattaattacctcttgtgtggaaaaatgtgagagtttagtttttaatagtaccttatttaactgggtttgcattgaaatggtataggttgtttctattctgtgtggcaaaaagctaataaataattgtataaattctgcttcttccaagaaacagagaaaaaaaagaataaatcatggggggggggcaatgattgagtaatgaaaatcatacatagcaactaaatagagacctgtaaataaatatgctgacaattgagacagagatgccctcaaaaacagacattgaagaaatgtattctgtgagaaaaaagtctcgggtaaatcatttttaaaaaggtgaaggagacggaagaaacaaacaagagccatgatccgtcaatcatgagcttcagtcgtgaaagaaaaggagaaacagctacgcgaagacatgtgatgaaatacaaaaaatacagacttttgttaataatattgctgatcagtatttacactacaattagttattttgttaatacttgtgtagtaaagattttatttttaatattatataataagaaaattagttaaacatggtcttcagccaatacctaaaagcgagaatattcttactacagagagagaaaattttaaaaaggaatgtttcataaacttttcacctgaagaaagtattggtaatcagaattttagagtaatgtattccttgaaaagatatgttcaatagaacatgagtttcatcctggctaacacggtgaaaccccgtctctactaaaaatacaaaaaattagcccggcatggtggcgggcacctgtagtcccagctgctctggaggctgaggcaggagaatggtgtgaacccgggaggcggggcttgcaagtgagcccacattgcgccactgcactccaacctgggcgacacagcgagactccgtctcaaaaaagaaaaaaaaaagaacatgagtttcggctggacatggtggttcacgcctgtaatcccaggactttggagggcagatcatgaggtgaagagattgacaccatcctgggcaacatggtgacaccctgtctctactaaaaatacaaaaatcagctgggcatggtggcatgcacctgctgtcccagctacacaggtggctgacgcaggagaattacttgaaccaagaaggcagaggttgcagtcagccgagatcacgccactgcacttcaacctgggcgacacagcaagactccatctcaaaaaaaacaaaaagcaaacaaacaaaacatgagttgagactaaaatatattaaattttttaaaatctgaactccacttggaggatactagaaaatatagtgtaatcttctttcctatttactacatatctctgatttattgtcttcttatttatgacataatttcttaagataacacaagttaatttatgcattctaaatattaaaagaaaatataaatttaagccatattttagaaacgcattagatttaattataaggtatattatgcatattatcttacttgtaatattccattacataaaaattcatttgcttatttattcacattgaaaacctcttaaaatgctttttacaggcaagactgtattctgggtacactaggatgcacacaagtatgttttctaacctgcagtatctcatagtgatgcaagagcttcaaaacaattatttaaataactaaataaaaaatcttctgaaatttaaaattttcaaatgtgatcaaagatctttgaacaatatgtttaaaaagtgcaatttaaaaactctgaaattaaaatcttaccatatgcttattaagagtctctgcttccagaactggttgtttacttggggtgaaacctgcattcttcatttagttgaagaatttaaagtatacttttaatgaaataacttagaaaacatcctcacatgccttaataatacagattctgagaaagagaatttacatttctaaatttctacaattatattcaaaattagagataagttctcactatgtgcccacactggtctcaaactcttgggctcaagcaatcttcctgcatcaccctccttggtagctggaactacaggcatgcaccaccatgcccaaataaattttcacaatttctaatattattttggtgtttaattaaagaaccaagaagagaaactgataaaaagctctctcctaaaaactacatgatatcaaaataatatgtgccaaaaaaacctatatgctatgtggcacagtttcagaactgaactttatcagacagattccctgattactgtaataagtaactggatccattaaagataattttaaggatgaggtttttttaaagttacaatagaataattttaaaagtcacagtaagtttacttatgcaaagaaacctttaccagattttatatattctctattgtggacacgttttttctaatataatgttgctgtcactatgtattctacagcccgttccagtttttggccctcacaccctcaaagtatttaccaatcatttgttatttactgaagtaaaacaaacaaacaaaaacaaaaaacaaaaaaactgtttaaatcaactactcatatttctataaaatgtttttatgtgaccaactttatattaccaacatgaaattatgatacatacaccactgctaaacatgaaaagtaaatactatacagaattagattccaactgagaaaatcaatttaacaagagaccattttaccttggtagtacgattaaagtcttcctcaacttttgtagactgtgaattttcagtagtcggtttgccaaaaagactagagaaaaaagataaaacaaaaatgagcaaattcatatatttaaaaagaaaatctgctagttcatatcttggtgctcactccaaaaaatgagaacaaaaaaaatctggggaaagatcagtcctcgatatattaaatcatgtttcttggcataattaaaatatgccatctggtttttgttgtttttttttttgagacggagtctcgctctgtcgcccagactggagtgagatggcgcgatctgggctcactgcaagctctgcctcccggggttcacgccattctcctgcctcagcctccccagtagctagggctggagcccaccaccgcgcctggctaattttttgtatttttagtagagacggggtttcaccgtgttagccaggatggtctcgatctcctgacctcatgatccgcccgcctcagcctcccaaagtgctgggattacaggcgtgagccacggcgcccggcccctctgtttttaaaaaagattgtatttacctattttcgactctatctctccaacctgtaacatccaatgaacactcactcttagttccataaaaaatagtgaccgccaatataattggcataccctgagtataattcgtcctcacaaactgtcctctatggtgaactgaaaatgtacttaatggctgacataacttttgatatctaaactggaacaaacttgataacctaaaatgaggaagaaaggtacagttaccttgtcccttatccattgtctatctctgattcaaagactaatctgtgtcactggaaaatgacattctttgtttttcggcataaaaaccacttaaaaaggccttgttgcttcccttcaccctaaaacgctacaagagagtgccctgaaatatctgaaatgttgaaaagctgaacctacaaatgtcaaaatacaaatctatatttgttattgggaatagttttctcacaaaaattgaaatattaaaagtaataaagtctaactacttattttataattgtccttccttgttcaggtctacataaactagcaaagccttaaaaatcttcataggtacttatacccaaggagagagactgctagaaaaactgagtcctgatagttgaatttctctaagtactatatatacagagagaaagatcaggaagtgggagccactatatatagtgaaagtgtctcccacttccagatctttcttctgcagagcttcatggcagtctccaacctttaaacatttagctcatctaagcacagattactgaaaagataaactcaatgaccaaccaataagctctgtatttacctgttcctgaaaaacaactaaatggagtctcagtcatgttaccaaaaacccaactgaagctccatgactaatttgacagccaatcttccccctgctttacatgtacatgggtaggacatcagaggcttggaagaagaggcaaacgggaggggacacctgccttaggccacagatctatgtaattcagcaaccttcaatcccctagcactcaaggggctctaagccactcctgtgagatttggggtgaaagaacagaataggacatttctattctgattgtggagacttttctgagttggtctttttttctaaatctttcaatagaaatcttgaagtttgcccattcctccaattaaacaagcaaaaaaagcagcaacctattcaggacttctttgaaccctattttagtatgcctttctagataactcccaatgtcttctgtgtttttggtcctctaatttatcttcatcaaacgtcataagatccaatattctgatctctttggtaaataaaacccttactcctaccaatcctgggattgtttctcttcaaacttggcctttccctgataattccattcttatctacttccactgggttctccagctaattccattcttatccctttccatttgtttaatcagatccatccccttttcctttctattattcaaacactcacttacatgatgatataaaaacaagagtaatgggctttgaaatgagtttaaatattacttctgctacctcttgtatttaaataagtcactttgagtttcagattctccatgtgaacaacaatttttccaggatattaaatagagtttaaaatatgaaagtattttgattagtctccaagagtcctaaaaatcctaaaattccatgtgctttaattttagctatagaaaaacggggctggcagaaagaaataaaataatagaagaaaagaataccaaggaaagcagagaagaaagtaatcaggaaaagattataaataagtcatgaaagaagagaaaagactctagaaaagaaaatgaagagtgcatgcaactaagaggggaatgctttgaagaagaactaaattaagaagtcagtaaatagagaattctataagaaatagtctctaaatatgattaacatatctatatgtagatattctccactaaaagtgaaataatccatctataggatttacctggtattgcatatgaaacaaaagcctatgtcttgtggccacagctaagtaagatctgctctaaaaacggcgataaaaacaaggtactggttaccactttaacagttaaacatgttagaacaaagtcttgaattaatcagtgttctatgggaaatctctaaaaagagttaacatataacaaaatgtgactttgtgaattgatcccatctggacctgtatcttgatcctagtgatgcacaggtctccatccatctatgccgagggggaagtgaagggattagggagcaaggtaagcagatggcaaactcaagggtcagctactttttagctatgaaatcataggtcaattaatcaacctctctgaatcacatttgcctgattaatacaaagtaggtgacagtagcacagatgctttgcaaagctgtgtgatgactatgtgaaatgataaatattaagcacataatacgttgtatagcccagagtagaatactcagcagatagtgatttcttttctctatattttctgagttaacatatacgttttaaaaaaccgcaaagtcttacctgaatgtggactctacagaactcacatccactattaaagaaaagagtaaaatacattaaatcaacaaatacaaataaaaaatacagaatattaaaaacataagagggcacgatggcacatgcctgtaatcccagctacttgggaaggtgaggcaggaggatcatctgaggagcccaggagtctgaaagcagcctgggagacattgcaagacttcaacttaacttaaaggaatcctgcacactttcatgcatgattcaggtcttggtttaaaaagcataatactctgacactttgttacaaagactcagatgatttgttacaaagcattcttttgggaccatacattgagactatagtaaaattattattaagtatactattggtaggaaattaatgcattaagaatgcttatttcccctcctttgtagttctcaaatgcaaggaaaaatggaatttatcacaatttgatctctgcaagtgaactacagtgtacaatagtcataatccaaacagaaccctataagactgacagaaaactgtattattagaagaattagtataagtggacagtgtcaaacttagaaagtataatttctagacaaatggactagaagcagttagaacagagtatacagtagtctcttatctgctgtatgtgtagaaagaaacacacacaacatgatttccctctgctctcataccaaaatcattaaaacagaagacatctgcgaccaaatgtgtggaggattttctccaccaactaataagcaatgaattctgtagcaaaaaacagctgactgtcctctatttaattccaacactgtctatctagaaatagtctcagatcccacagactgagtgctcagtctcacaagacttccctcacacaccagttgcaaatctgggtctctttaatttctgtgatttcagttactcatagtcaatgatagtccaaaaatattaaatgtggaattccagaaatatacaagtcataagtcctaaataatgtgtcattctaaggagtacaatgaaatattaaggcatcctgttccatttcatccaggtcatgaatcatccctttgtatatgctatctgtccattagtcatcaaaatggtctgttcctgaatcccaaccatcaacattatcatggctcaatgatctagggtcacatgaagcagatgatcctccttctgatgtgtggtcagacagcaagaaataattagtagcctaacaccacatgacaattcctacctcattcacctgacttcaacacatcacataggcattatatcatctcacagccatcacacaaaaaagaagggcgagtacaatacaagacactttgagggaccatattcacctaactttgattacaatatattgttattgttatattttattatgagttcttgttaatctctcactctgcctaatttatgaattaaactttatcataaatatgcacttatagaagaaaaaaagcatggatgtatagggttccatactatccacagtttcagacattcaatgggtgtcttagaaaatatccgccttggataaggatgaattactgtacttgtgtgtgtgtgtgtgtgtgtgtgtgtgtgtgtgtgagagagagagagagagggggagagagagagagagagagagagagagaaacaatacagatctccactctccacaagaagcagataaaaaagacaacacttttcctcacacatgacccttaggttttgacaattctggaaaaatgctggcatgtgtactccccagtctagacaatttcctagaccctgtgtatatatgctgctttagttgcaaaaagttaggtaggatcttgggagatttcctcttggacgccgaaatattaaccacatcaacattatacctaacaactctaaaataattcttttgaacagattaccactgaagaacttgtaagttaaatccaattgacttttcagttataatcttactgctgaaattctcatatttaaaagaaatttgcaacatcactttctctgactcctctcgtacttttcattagccactgctcagtctcctttaccaagtcctgtgactctgtgaaatgttgatactcccaggattttgtcaatggctttcttcttattctacatcttctgcatcatggataagctcagtgagatctatggctttgcttaataattataataaaattattctaagcctgcatctccaaccagagttctatctccagctagaaatacgtataaaccaattacctactgaaaatatcccacatgaatgtttcattgaactcaatatgtaaagaaaacggttggtctgtcccatgactgtttgcacttttctgttgacctgacaatttcctactccttccccatgagcattccccatgtggaaacttatgaatgacctgaaatttcttctctcccgtagctttttcaactcaataatcactaaatcatcttaactgtacctcttttctgcatttgctttatctttccattgcaactggaaatacaaacttatttattttatatttatatttcctagttagacatggccccttaactgatggctttcacaggaaaaaagcaaccctacctgtaggggatcggacaaagtggttaaaaaaattataaagatagttataggaaatagacacaaaccttcttggaaggccggggggttgcatagcttcagtaaatgatttggctgaaaacagcctaatcttctttactttgagttggtagcaatagagcaaatatctagggaatgtggaggagtttatctaaataccttgtttactcacgtggtcctaagacaaaagtttgatcatccgagggtgcatgattgctttgtactgggggttggcaatcttaattaccctctagtgatgtttactcaacagctttgtcatttaatctgtattaaataaatgcgaactttgcaggcttatcgaggccaacaatgcagactcaggcagcagaaccccttagctgcactgacaggcaaaatatctgtttcagtatacgtctctcatccatcacttaggtcagtgtccataggatggacccggcaggtggcaagacaaacgatgcaaaaggatcgtgatggacccctcaaaaatgaaggtgaaaagaactgcgcaggcagcgagtaagtcattggtgcctgctcaggatttccaagtttgggggaaattgttcaggcaagagtttcatcatgggacaacaattatcagcacaaaagaaacagtatataaaagtattgaaaaagctgcttaaagctagtgcagccttggtatcgcggtccctcaattaagggacacagtgcaaactgttgtattccaccacccatggttatggaattccaaattcaccttaccaaatggattttagacaaagttttattggagtacaatcacgcctatttcttcacatgttatctatgactgctttcatgctacaatggtagagttgaaaagctgtgatagagaccacatcacctaacatatttcctgtttggcactttacaggaaaagtttgccagtgcctggtttataccatgaccagaatgctctgatacttaaatctaatcttgggactcccctgctcaaacaattccaatgaatccgtgcagaaaacattgctggctgccaatgcatagaaattattttttctttcttacagcagaaacacaagtttatttacatatttattattcctttactcccatctcatctacaaaatgagaaatcattattctaagctaatcacagtaagaacatttgcttttctagtgactggtttacaaatgagtatttgtactcagaggctgatggaggagaatcacttgagtccaggaggcagagagggtagtgaggtaagatcacaccgttgcactccagcctgggcaaaagagggaaactccatctccaaaaacacaaatatttaaaatgcattccagtattttaaatattttcgttttaatttctaatattagttgaagcagtaaatgctcccacttcaataaaagctctctgatataagctatcatttgatgttgacttttagtggctatgaaagacagcctaattaaatgtgttttagagttaaaatcacaaactatgaagcctgaaatcaaagcggagctaactgtattgagtacacctaaaatataagataagcaaaaaaaaaggaagttccaaaataatatgtacagtgtacaactatttattgaaaatttaagacatgaaaacaaattctacacatagtctagaaccacacacatatgttgtgaatttctggggttttgtttgtttgtttgtttgctttttgagatggagtgtcactctgttaccaaggctggagtggcacgatctttgctcactgcaacttctgcctcttaggttcaagcgattctcctgcctcagcctccagagtagctgagattacaggcacccaccaccaaaaccagctattgtttgttatttttagtagagatagggtttcactatgttgaccaggctggtctggaactcctaaccttcagttatctgcccaccttggtctcccaaaatgctaggattacaggcatgtgccgccgtgcacagcctgttgtaacatgttttaaacatgcatgggaatgacaacaaaaactaattcaggctgttttgtgcctctaggaaattaattacagtagcataaaaagatactaaggccaaatgctttagagttacgcttctaaaacaccgtgtctagcaaagagtcatcaagtaatgatttttaaaaattataagtcacacacacacacacactcaatcacctaatcagaaaaacaagaaaccgattttctttagattctcagagtgacaacactcacaactgtcatgtcagcaagtgaaactttcctcaaagtaaagatcagaattccaatcagcatttgaaccactgcaaatatttcacagtgtcaaaattcacctgcctcaaaaccgagcatgtatagaaattgcaaattggaaactttatagtatcaggatattaaagaagaaccacatgaggtacagtagaattttttttaaatctctaaatcttacgcttgtaaatggcattttctcaaacatgaatactaacattggtattatttgtgtcaaatttccccatccaattttgaaaagaaaacaacattgggaataaaaaggctcttggcacttcaaatattttaatgttcttaattccacagtaaaattaaaattacaaaatttacctgctttgaatgtttctctgtccttcaattctaaggctttatttggaagagaaattttcattccacaggtaggctaaatgggtttggaaacacaataattactatataatgtatacttcataaaataagtagttaatattcaagataaaaatataaaagttattaccttcagaagaccatctttatcaggagagtctaaaagaaaagggacatatataattgattatacgcaagcctgtcaaagtctaccaaacattcatgcagtgtgaatatgaagatgaatcctcacgcttggattgaaaaggggttacactaggttttggggtcttttgggttattgtgtttgttaacatgccagcgtgacagaaatatacctaagaaaatttaaaaaataaatttcctcaaacatgctgtgaagatttcaacagtcaaaatatatttcaagtgacattaactaaagcagaaaatcctaataccagtaagagtaagctgtcacataaggaaagaggttgaatttagtaagatgaccaagacatgacccctccaccaaaaataaataaataaatgtccaagctaatggtagaatgctatgacatattattaaagaaacacatcagaatcacttatgtcaatatactacaagtagctattatgttcttcaatttgtcctgtaatttaagaattgcaaagctccgatgagaattcaaaggtacaatttacttatcattgcagagaatgttctaaattcatcagcataaatactacttatagaataaaagtttataaatatatttatttttgaacctctgtgaaatacgagtatttttacatttctggggttctctagtttagtcttcttaaaatttcgtgatccacttatacagaaaagtcaaagcatacccatcaacaaactaatacagtccaggtgccatggctcatgcctgtaactccagaaccttggaagcctgaagagggcggatctctcgaggccaggagttccaaagcagcctggccaaaatagcgaaaccctgtctccacaaaaaatacaaaaatcatccaggtatggtggcacatgcctgtaaccccagctacttgggagccggagctgtgagaatcacttgaacccaggaggcccaggtggcagtgagtcaagatcatgccactgcactccagcctggatgacagagtgagactgtctcaacaaaagaaaaaacaccctaacatcacaattaaaagaactagaaaagcaagagcaaacacattcaaaagctagcagaaggcaagaaataactaaaatcagagcagaactgaaggaaatagagacacaaaaaactgttgaaaaaattaatgaatccaggagctggttttttgaaaggatcaacaaaattgatagaccgctagcaagactaataaagaaaaaaagagagaagaatcaagtagatgcaataaaaaacgataaaggggatatcaccaccgatcccacagaaatacaaactaccatcagagaatactacaaacacctctacgcaaataaactagaaaatgtagaagaaatggataaattcctcgacacatacactctcccaagactaaaccaggaagaagttgaatctctgaatagaccaataacaggctctgaaattgtggcaataatcaatagcttaccaaccaaaaagagtccaggaccagatggattcacagccgaattctaccagaggtacaaggaggaactggtaccattccttctgaaactattccaatcaatagaaaaagagggaatcctccctaactcattttatgaggccagcatcattctgatagcaaagccaggtagagacacaacaaaaaaagagaattttagaccaatatccttgatgaacattgatgcaaaaatcctcaataaaatactggcaaaacgaatccagcagcacatcaaaaagcttatccaccatgatcaagtgggcttcatccctgggatgcaaggctggttcaatatacgcaaatcaataaatgtaatccagcatataaacagagccaaagacaaaaaacacatgattatctcaatagatgcagaaaaagcctttgacaaaattcaacaacccttcatgctaaaatctctcaataaattaggtattgatgggacatatctcaaaataataagagctatctatgacaaacccacagccaatatcatactgaatgggcaaaaactggaagcattccctttgaaaactggcacaagacagggatgccctctctcaccactcctgttgaacatagtgttggaagttctggccagggcaatgaggcaggagaaggaaataaagggtatttaattaggaaaagaggaagtcaaattgtccctctttgcagacgacatgattgtgtatctagaaaaccccgttgtctcaacccaaaatctccttaagctgataagcaacttcagcaaagtctcaggatacaaaatcaatgtacaaaaatcacaagcattcttatacaccaataacagacaaacagagagccaaatcatgagtgaattcccattcacaattgcttcaaagaaaataaaataaataggaatccaacttacaagggatgtgaaggacctcttcaaggagaactacaaaccactgctcaatgaaataaaagaggataaaacaaatggaagaacattccatgctcatgggtaggaagaatcaatatcgtgaaaatggccatactgcccaaggttatttacagattcaatgccatccccatcaagctaccaatgactttcttcacagaattggaaaaaactactttaaagttcatatgggaccaaaaaagagcccgtgtcgccaagtcaatcctaagccaaaagaacaaagctggaggcatcacagtacctgacttcaaactatactacaaggctacagtaaccaaaacagcatggtactggtaccaaaacagagatatagatcaatggaacagaacacagccctcagaaataatgccacatatctacaactatctgatctttgacaaacctgagaaaaacaagcaatggggaaaggattccctatttaataaatggtgctgggaaaactggctagccacatgtagaaagctgaaactggatcccttccttacaccttatacaaaaatcaattcaagatggattaaagacttaaacgttagacctaaaaccataaaaaccctagaagaaaacctaggcattaccattcaggacataggcatgggcaaggacttcatgtctaaaacaccaaaagcaatggcaaccaaagacaaaattgacaaatgggatctcattaaactacagagcttccacacagcaaaagaaactaccatcagagtgaacaggaaacctacagaatgggagaaaattttcacaacttactcatctgacaaagggctaatatccagaatctacaatgaactcaaacaaatttacaagaaaaaaacaaacaaccccatcaaaaagtgggcgaaggacatggacagacacttctcaaaagaagacatttatgcagccaaaaaacacatgaaaaaatgctcatcatcactggccatcagagaaatgcaaatcaaaactacaatgagataccatctcacaccagttagaatggcaatcattaaaaagtcaggaaacaacaggtgctggagaggatgtggagaaataggaacacttttacactgttggtgggactgtaaactagttcaaccattgtggaagtcagtgtggcgattcctcagggatctagaactagaaataccatttgacccagccagcccattactggatatatacccaaaggactataaatcatgctgctataaagacacatgcacacgtatgtttattgcagcattattcacaatagcaaagacttggaagcaacccaaatgtcgaacaatgatagactggattaagaaaatgtggcacatatacaccatggaattctatgcagccataaaaaatgatgagttcaagtcctttgtagggacatggatgaaattggaaatcatcattctcagtaaactatcgcaagaacaagaaaccaaacaccgcatattctcactaataggtgggaattgaacaatgagatcacatggacacaggaaggggaatatcacactctggggactgttgtggggtggggggaggggggagggatagcattaggagatatacctaatgctagatgacgagttggtgggtgcagcgcaccagcatggcacaggtatacatatgtaactaacctgcacaatgtgcacatgtaccctaaaacttaaagtataattaaaaaaaagaaaaaacacctaatatgaaagtatcaaaaattagaagtcaatttccagagaatttttatatatcattaacctgcatatttcaatgttggaataatggttactgaaaataacagttttattattttgttgctaaaactaattctatttgttataccatgcgagtagttaaaacactgttatgaaaaagctcttacaaaaaacttagcttcaagaaaaaacagacatttctttgacatagaaatatatcttctttcatcaaataatatgaataaaacatgcttaatctctcatttttctctacttttttatttttcagtacaacatactttaatatatttagacatatcaagtatatatgctgtttcccttgagagatgattgatcaataatgaagacacttcagggatataaactctctaaaacacaaaaaatgtatgtccaagcattttaaggctaaatacatgaccgtattgcaggtaggtgttttagaaaaaaagtgcttaaaagtgtattcaacacactttaaataaaaacctgccttaattacgatgagaaggtcattctcgatttattaatatctttaaactttacttctgaagcactgaagaaacctcagaatttcatatataagaaatgataccattaatacatctgtttgttttaggtaaaaatatgataaatgtacatcctcactaagtgcaaagaaagcagagtgtcatgtgatatgaaatgaatatgtaaccgaaatattttcctttatgaagaaaatagctggctttgacctttctaagacaagataaaaaagcaaaacatgcagagatgaaacattcagagctatctcatcatcaacgaaccgtttatcacttggcatttaggaatcctatgtatggttgaaaactctggttctaaattgtgatctgattacccctgaagttcaaaatccatgcagaggaaggaagcaggggaatactaccttcgttatttttttattacttttatttttataaaggtgtacactggagttttttagagtcaggacaggtcacatggcatggctctaaagattagtgagccacatttgtaatggctattgaaatgtatggctgtgaatccttgcattttaagtacttcacttttaatttctaatgtagcgtgaagtaagacatacacttaaacaaagccttgttgacatctgtaattatatttatgttgcttttgagtcatcatgaagagagtctaattaaacgtagtgcaaagtaaaaatgcacagtcagaaatgttttctttatttttttattttaatattattatactttaagtttgagggtacatgtgcacaatgtgcaggtttgttacatatgtatacatgtgccatgttggtgtgctgcacccattaactcgtcatttagcattaggtatatctcctaatgctatccctcctccaaccccacaacagtccctggagtgtgatgttccgcttcctgtgtccatgtgttctcattgttcaattcacacctatgagtgagaacgcgcagtgtttggttttttgtccttgtgatagtttgctgagaatgatggtttccagtttcatccatgtccctacaaaggacatgaacttatcattttttatggctgcgtagtgttccatggtgtatatgtgccatactttcttaatccagtctagcgttgttggacatttggtttggttccaagtctttgctattgtgaatagtgccacaataaataaattctttttttttttcacagagtctggccctgtcacccagggtggagtgtaggtgcacgatcttggctcactgcaatctctgcctcatgggttctcacattctcctgcctcagcctcccgagtagctaggactagaggcacccaccaccatgcttggctaattttttgtattttttcatagagacgcggtttcaccatgttagccaggatggtttcgatctgctgacctcgtgatctgcatgcctctgcctcccaaagggctgggattacaggcgtgaaccacagcgcccggcctgaaatcttgaaataaatgaaaaacgagctaatcgctgaacaaaaaaataaaaaatcgctgtggaatgacaagaacattctacaaacatttatatgtggtttttgcaaaaagtgttaatgccaatgtgtatatgctgagtgatgaggagataagtgatcttgaatcagaggagcaactcgtgacactgagaaaataaatgcaaaagctgaacgtagaatgctacaccatgtgtctttaatgcaacacattataataatttatatcattacattacaaacattcatcatgttctttaatacgtcctgtcactgagaaggtaaaaagtttggaggagagttcagctgaatgtagaactgacatctcagcagtgaaagtgttatgaattgatcagcttggataaatacttagagaataatactaaatataaatatccactaattttcatacccatatggtataacggtatgccaacatttttgtaatttgtagcttagccatctcaatattccttgatccactcatggagaaagatgtacaaaactcatcaggaatagcaaatataataagctttcaatattgatatatttgttttaaatttagttgcaacagacttattaaatattaataacattttctatgttaaaatcagtacaatacctatgaataagaacaatttaggtattcaagcaataaattcagaattttttttcttcttctctggctaaaaacatactcaaaagtaagagcaacataacgctttctcctaaccttttctgtcttgacccgttatccaattactcttcttccacatttctcccatgaaaggcctctcctcttgaccctctatccaattactctttttccacatttttcccatgaaaggactctcctcttgctactcggtctgaggtccaaggaccaccagcatcagcatcgcctgacaacttactaaaaatgcagaatccctagtcggctgaatcacagtgtgaattattaacaaggttttcagatgattttctaaagtttgaaaacttatggtctatacggagtgtatatgacgaattatatacatgtgaggccgtgcatatatgcttattctcaactattgcaaatagaacacagctctccatggtcagctgcttccatccctaatggcttcccaccagtgagaaagacaggaagagtcagaatatttttgctgtaattctctggtatgttttggcactagaaagtcactttatattcttcccaaatttctaaccatacccgatcttttcctaaagaatcatttcattttaccatcctccattatataaacctgcctcttgttccttcccgtcctctctgtactctctgtctttctcgatcttcatttcctcttttactactttctcctttcttattttctcattttcctcagctcttggaataccttgaattcaaactaataattcagttcctttccagcactctcaatgtagtctgctgccaacacatgataagacatgtaacttatcaccatttcacttctctttttttccatgctttgcattcaggaggtaattttcttcagctattaggggatatccctcctcatcagttcagagaaacatttggtcaaatgactttttaaataaaatatggttcttaccttctaattttccacttaaggtatcaaattctttttgatgtgtagccttgggtaaacacacatcattctgtaagagagtctcaaggaaactctgttaaaagtagtatcaataaataatttcaatggagaaatcccaataatgaagagtatcaaaagttcctacttaaaatcttttctaaaaacacagtttcctactttacaaacaattcgacttaagagcagacatgtgttgaaacccaaaacattctgatagaaaacctcacataacactctccacatcaacttacctttacgttcatgaggctattaacttggttactgagcaggaaaaacaaatcacactcacgaaagaattcactcgtgcatatttcagaaagtaactctcttaaaaatatctaacttgtgttgtagtcctcattaaaagtaaatatgccatttcaaacaaaatacaatacacttgctactagccataacacatactgcattaaacatttaaaatattcatgatcatagaattgtttagtgttaaaaatgatgcatgccgtgaggagaacttttagagtctgtcatgtaatgcatgcacggaatgtttaaaaagctgctttattttggtaaacaggggcttaaaacaagcaacatgtttttgacaaaatttatgctgatagaaaaagtgcttgaagagaatgtaaatgcagtaagaaaagaaattatgtcatgtctaaatgaaagccaacaaatattaaagtctttttgtctgacgacaaatcagataaaatctacttgtctactgacttccaccctttgctcttaccaccaggcagcagctgcttgtttctaagaggtcagatattttccatgtctttccacagttgtgaccttaaaatacatcactattatttcacgctcatgctgctgcagcttgactgcctgccacaaagggactcgaggagttctacttgtgaaaataatttatatttttcaaaagattactcaaccaatactcttgttactgtagtcccacaaggtttcctagtcctcatgctcctctttctcctgaaatgttccctcagatctatactgaacaatacagaaatgtcaatatattcaagtcccaggcattaacttttcaggtcccaacttttacaatactgcagtttaaactgtctctctatgaatccagttagaacttttgcacatctagatacaccacagaatcataaatttgcccacagctggactcagtgtaattctttcgcttttagacaaacttgcttcagatcccatgtgaatttctagtgacttctaagccttattttttacactataccacaccggcttcttaaattaagcctacaaattagcagaatttcactatgaagcagtcatctattaagcgtattctgaaaaatatcgaaaataatttgggagtgacatatgcagaggtgagaaaataaagtctaagcctctgcttttatgtttttgtatcatgcaatactagtattaaagaaaattaataatacacagtacctcaaaatcccaagaatgttcttcatcgtcctattgcttggattctgattggaacatctgagctataaaaggttaatcacagatacattcatgagaacatttctctactataaactttaaaaacatatataaatctactttcattcacgaatctgcggttattcctctgtagcccgtatattctttttgttgattacaatcactacttctatagtcaatccgttagaattgaaatctaaaaaaatcggaaaattaacattgtatcattcgttagaatgcagaaaaatagaaatttgactaactcctagaattatttcttcacaaagcagtcatatcctcttctcccgtgaaacacagtgtgtcctatacttgctgttcattcagaaaactttaattacctatcatctctcacttctttgtaaatttttattttctagtattacttagtttgattgactctgcaatctctattacacagttcttcaaaaaagatgatttatcaacgaacaagattttttagggatattaactttctgatgttagtaaactatatgtccaacacttttacatttcaatatgccatgacagtatattgggtgtgttttgggtgtctatatgttttaggaagataagcttaaaaaacttttattgcatataaattaagaagtgctttaattacaatgacatagttcttccctaactcaacaatgtcttcagagtcagcttgtgacaactaggagaaacatcagaaatgtataggaaaaaataattgccctaagtaatctcacatccccacatgttataggataaaatcaaggcccacacaagacttgaggagctctcaggccaatgagacagaaaatgaacttataccaaaaataacgttcagctttctttatcaaccaaaagtacacattacaactatttgaatcaggttaaagaaaaaagcaaacatgcacaactaaagcctaaaagactgtatcatcgttaaaggtacgtttatcatttgacatccatcaactgtgtatctgatttttaaaagtaaatttaacgtgtgatctcagcatccctaaagttcacatttcatgcagaggaaccaagaaactaaaatcatactttggtatgccaccattttcactcatgtttagaagtgtaccctggatcgtttcagagatctaatgtgttgcggtaccatagctctaataatctgtgggtcgcagttcaaattgttagtggaatgtatgattgcacaaggagatactttaaatattttagttttactttctcacaactaaaaagtcagtacatataactaacttaaagactctgaaattttcatgttttcatttttattcattatttatcagcataataattatgtacttaatggaattttataaacaatctgatatttaaaaagacagttaattgtgtcctttatggacgtctctaaaaattataatgctgatcaaaacagaatgttgccaaaaattacactgtacaaccatgtatgcattagaagttgaaaaaaattttacatattaaatatgaccacgtacacatgttggaaaatgtttaaacatgcataagaatactttaaaaaagtagtttagaatatcggttacttctaggcaataaatggtactagtgtaaaaagactctgggccgggcgcggtggctcacgcctctaatcccagcactttaggaggccgaggtgggtggattacaaggtcagcaggtcgagaccatcctggctaacatggtgaaaccccgtttctactaaaaatacaaagaatgagccaggcgttgtggtgggcgcctggattcccagctacttgggaggcccaggcaggagaatggcgtgaacccgggaggtggagcttgcagtgagccaagatcacaccactgctctccagcctgggcaagacaatgagacgggcgagacagcaagacgccatatcaaaatttaaaaaaaaaagaaaatttaagacgtgaaaacaaactctacacatagtcagaaccacacacatatcttgtgaatttatggttgtttgtttgctttttgagatggagtctcactctgtcactcaggctaaagtggcacaagcttggctcactgcaacttctgcctcatgggttcaagcgattctcctgcctcagcctccagagtagctgagattacgggcacccaccaccacaaccggctattgtatgttattttcagtagcgatggggtttcactgtgttgaccaggctcgtctgcgactcctgaccttaagtaatctgcccaccttggtctcctaaattgccaggattacaggcatgtgccgccgtgcacagcctgttgtaacatgatttaaacatgcatgggaatgacaacaaaaattaattcaggctgttttgtacctctaggcaattaattacagtagcataaaaagacaccaaggccaaaagctttagagtcacacttctaaaacagtgtgtctagcaaagagtcatcaagtagtgatttttaaaaattatatgtcacacacacacacacacacacacacacacacacacacacactctcagtcacctaatcagaaaaacaagaaactgattttctttagattctcagagtgacaacactcacaactgtcacgtcagcaagtgaaactttcctcaaagtaaagatcagaattccaatcagcatttgaaccactgaaaatatttcacagtttcaaaattcacctgccttaaaaccgagcacgtacagaaattgcaaattggaaactttacactatcgggatattaaagaagaaccacatgacgtaaagcagaatttttttctaaatccctaattcttatgcttctaaatggcattttctcaaacataaatactaacattggcattatttgtatcaagttttcccatcaaattttctaaagaaaacaacattgggaataaaaggctctcagcatttcaaatagtttaatattcttaattccagagtaaaatttaaattacaaagtttacctgctttgaatgtttctctgtcctttaattctaaggctttatttggaagagaaactttccttccacaggtaggctaaatgggtttggaaacacaaaaattaatagataatgtatacttcataaaatatgtaggtaataatcaagataaaaatataaaagttattaccttcagaagaccatctttatcaggagactctaaaagaaaagggacatatataattgattatatgcaagcctgacaaagcctaccaaacgttcatacagtgtgaatatgaagatgaatcctcatgctttgattgaaaagggattacactaggttttggggtcttttgggttattttatttgttaacatgtcaactgtaggatgactccctgaaactattgctatggaatgaaagatgcaatgctcctgattattgtaaatacaaaattgcatgcaggattgtgtaaagacaatgccaggttggactgccagaatgagccaacagcacatgatgtgtttccccctgcagagagcctgtgaatggatgtgcagtcagggaggttttacatcaccaagattcctatcccagaaacgcatatgttcatagctctgggaatggaatgccacccttgtggagagcctataaacagatgcatggggggcgcctgtccatatggataagatagtgctgtgaacgccctcatcttgccacggctcttctaggcctctttagggttaaggcatactcctgagaatttctggtctaaccagttgtctagcttcacatcctgtttctatggattgtttctaaccagcttttgctgcaactgttactgctgattaatatcttgctaatcataggttatagaaagactgtttcttttttaaggctctgttagaaattaccgatgcacacactatattgtaaattcttatccctgtgtactgtatttagctaacatacagatgttagctaaagaattacttcacccccatgtgaccatctcacctcataatcaaatgatcctaaatccctcattaacccacccccaccctcactaaacttaatagtaaatgcgggtatatccagtgaattgttggcaccacgggaacacaaggctgtgattcccctggacccagctttcactatcttgtctgtgtctattatttctcaacctgccgatccacctgggaacaaagacaaggccccattgcactgcaggctgctggacagatatccacatgaggcaaagctgaattttttttatctctaaatcttatgcttctaaatgacattttctcaaacataaatactaacatttgcattatttgtatcaaattttcccatcaaattttctaaagaaaacaacattgggaataaaaggctctcggcatttcaaatagtttaatattcttaattccagattaaaatttaaattacaaaatttacctgctttgagtgtttctctgtcctttaattctaaggctttatttggaagagaaactttccttccacaggtaggctaaatgggtttggaaacacaaaaattaatagataatgtatacttcaaatatatgtagttaatattcaagatagaaatataaaagtaattaccttcagaagaccatctttatcaggagactctaaaagaaaagggacatatataattgattatatgcaagcctgacaaagcctaccaagcattcgtacaatgtgaatatgaagatgaatcctcatgctttgattgaaaagggattacactaggttttggggtcttttgggtttctgtatttgttaacatgccaacgggacagaaatatacttaagaaaatttaaaaaataaatttcatcaaacttgctatgaagatttcaacagtcaaaatatatttcaactgacaataactaaagtagaaaaatcctaataccagtcagattaatctgccgtatagggaaagaagttgaatttattaagatgaccaagtcatgaccccccgccaaaaaaaaaaaaaagtcctaggtaatggtagaatgctatggcatactgttaaggaaacacatcagaatctcttatgtcaatatactgcaagtagctattatgttcttcaatttgtcctgtaatttaagaattgcaaagctgcgatgagaattcaaaggtacaacttacttatcattgcagaggatgttctaaatttatcagcataaatatctacttatagaataaaagtttatgaatatatttatttttgatcctctgtgatataggagtatttttacatttatggggttctccggtttagtcctctcaaaatttcctgatccacttatacagaaaagtcaaagcacacccatcaacaaactaatacagtccgggtgccatggctcatgcctgtaactccggaaccttggaagcccgaagagggcggatgtctcaaggccaggagttccaaagcagcctggccaaaatagcgaaaccctgtctccacaaaaaatacaaaaatcatccaggtatggtggcacatgcctgtaaccccagctacttgggagccggagctgtgagaatcacttgaacccaggaggcccaggtggcagtgagtcaagatcatgccactgcactccagcctggatgacagagcgagactctgtctcaacaaaagaaaaaacacctgatatgaaagtatcaaaaactagacgtcaatttccagagactttttacatatcattaacctgcatatttcaatgttagaataatggttattgaaaataacagttttattgttcaaggaatgaattctacaattgctttgctttgctaaaactaattctatttgttataccatgcgagttgttaaaccactgttatgaaaaagcttttatagaaagcttagcttcaagaaaaaacagacatttctttgacatagaaatatatctcctttcatcaaataatatgaataaaacatgcttaatctctcatttttctctactttgttatttttcagtaagacacactttaatatatttagacatgtcaagtatatatgttgtttcctttggagttgattgatcagtaatgaagacacttcaggggatataaactctctaaaacacacaaaatttatgtgcaagcatccttatgttatgctatgatgcatttgccaattgaaaggggcagaagaaggcatctaaaaatcttgaaagtcgaactatctattcaacattttggacctgcagtgctaaaaaatgaactcacattagattgaaggaaagcatagggagatgtgaatgatatgagctgctgaacaagctgtgtcttcaacacaatctcctattagggcaacattcaaataaaataaatatattgagattatatagaattatgatgctgactggccatgaattccagaggacacaaaaaaagatttgcggagtcagaggaattggaagataagtctatctggatagccatatcaggacagacatggctgagaacaaagcattgtctgtaatagaacatacaaattcttccttagaatgtagtaaagggactcctttattcatatgcagttcctgccacaactctgaatgcatagattcttttgactttacataaatgccacagatttgtttttattttaatgaagcccaatgacaggagatccaccaataaactggaggtagcaagtagctattgaaagttaagaagtttatgaaattattagaaaatgtcttattgaaactttctgttacccatctcctagcattcaacatctaccctcatcaaattctattagtaaatttaataatcactttttgcacaatcaaatttttattatgctggttaagtgggacatacaccatggttccaaattttctatactttaaaattcattttcttcatttatacttcataccattctaattttcgtaattggttgaattcattgcttcaatttctgattaatttctcatattatataatccttgagagaaaatatgtccttcaaactcaaattgtttgtttccagtgccatatagttaaacatttcttttattcagtatgtatttcaaccttccttgtctctccataaatcactatccttttttccctttacaattggtaaatattttattctgcaaagaggatggtctcattaatttaccaaatataatagttttgtataggaaaatacattgaaattctaaatatctattcaaaatgacatataacaaaaccaatttttttcttatcaatggtataaccaaacaattttgaagaaaatgatgttactcaaagactttctgtatgtaatgttgcttaaagtcacagttgccaagcatttaccaacaacatcaagcaaggacttcctgtacttaatatacaaatagttttttaaaaaaaacaaaatgtctctttcctctgctgaatgctgattgcaggcattaaatctccagttgcttgatgaatgcatattcttttaaaaaacaagctatcataacctattttgagtatagcaatattaacaatatatttttatctcctttgtgatagatcagtgaagcaagttttgaaatgaagttagtaattttgaatttaaatctacaatttaactttttaaaaatgctgaaattttatgtaacacttttcaaaggtctttagcataacaagttggtgagatgaaatggtaaaatgtgccaattagcttcctatcatagttcacttatatatcacttgcattttaataagtatcgttatagatttctgaaaagaccattatccttaacaaactaacacaagaatagaaaagcaaataccacatgttctcattctcatttataagtgggtgctaaatgatgagaatgtatagacacacagagacctaggagggtgggaggagagagaggatcaggaaaaaataactaatgggtatcaggcttaatacctgggtgatgaaataatctgtacaatgaacctccatgacacaagcttgcctatgtaacaaatctgcacttgtatccctgaacttaaaataaaataaaatatacaactagcagagaccaggcatggtgacccaggcctataatcccagcagttttggaagccgaaccaggaggatcacttgagaccaggagttggagaccaggagttggagaccagcctggggaacatggtgtgaccctgtgtctactaagaaaagaaaaaaaaaaaaaaaacagccaggaatggtggtggtgcagaactgtagttccagctacttgggagtctgggatgggaggatcccttgagcctgggaagtctaggctgcggtgagccaagatcatgccactgcactccagcaggggtgacagagtgagaccctgtcttagaaaaaaaaagaaaagaaagtgctaatctaatttccctactggaatcccctcttcacctgccctttctggaacctcacttgtcagttcttcctccaacttccctgtgtctttaacctgtcccccaccaatccttttggtcactgtggtggccaaagtaatgccccctaccaattgctcacgtcctaggttacacagcacagtttcagaggaagggggatattaagagtgcagatggaattaatgttactcatcagctgtccttgaaacaagattatcctggagtacctgggtgagcccatgtaattacaagggttctttaaatatggacgagggaggcaggaagttaagaaccagacagagtgagcacagtggctcatgcttgtaatatcaatactttgaaagccctaggcaggaaaatcccttgagtgcagcagttcaaggccagccctggcaacacagccgggccccacctctaccgaaaaattcaaaattcactgagtgtcatggtgctcacctgtagtcacagctactcgaaaggccgtggtaggattgctagcttggggggttgaggctacaatgagctgtgattgcaccactgaactccatccagggtgacagagcaagatcctgtttctgaagaaaaaaaaaaaggacattggaatcagggcttcctccatcctaaggtgcctacaaggcatctctctctgaaaatgagtaaacatcctctaattctccgcagagtggagcagcaggaaaacgcactcacctcatttctgtgctgcttgagaggcctggacatcccaataaccagctcattcctgatgaagaaatcaggaaatggctcgagttgagctacggagaatttggttccttcttttggttctcaagaggcagggtgggggccaggcatagtggctcatacttgtaattcttgcactttgggaggcctaggggagaggatcacgtgaggccaagagttcaagaccagcctgggaaacatagcaagacccgggtggcatgcacctgtggtccccactacttggtaggatgtggtgagaggattgatcacttgatcaacccaggagtttcaggctgcagtgatccatgatcacaccactgaactctggcctgtgtgacagagccagaccatgcctcaaaaagttagagagagagagagagagagagagagaaactataggcaggcaccagcacattcagctaatttttaaatattctgtagagatgaggttttgctaggttgcctaggctggtctaaaactcctggcatcaacagatcctcccacctcagcttccaatgccctgggattatattttttgtttactatcattgaagacacttgttcttatactgctttaaggtataaaaggaaaaaaaaacgcagataataacaaatgttggtgaaggccaggcacggggcctcagcttgttaattccagaactttgggaggctaaggtggccagatcattgaggccaggagtatgagaccagactgggcaatatggtcaaaccccatcactacaaaaaaaatataaaaattagccagtcatggtgctgtgtacctgtaattcccagctactcaggaggctgagatgagaggatcacttgtgcctgggagttcaaggctgcagtgaactgtaatgacatcactgccctccagcctgagagacacagcaggcccctgtctagaaaaaaaaataatgtcagtgaagatgcagaggaattggacccacacacataactggtgggaacataaattgccataactactttaggaatttcttttcttatcattttaattggattttttttgaaatcaagacagggtctcgctatcttgcctaggctagtcttgaacttgtgggctcaagtcatcctcccaactgagcctcctaagtagctgggattacaggtgtgaaccatcacacccaactgatctaatcactttagaaaatgtctggcagtttctcaagagcctaaatgtgcagtcatcacataatgcaacaatttaactcctaggcgtatatcccagaggaaaaaaaatatatatgtccatacaaaatcttgtataggaaccttcatagcagcattattcataatggccaatacatgaaaacaacccaaatgtgcaccaactgatgaatggataaaaaaaatgcagtgtgtttctaccatggaatattattcagccacagaaggaatgaaatactgatacacgctacaacataaaggaactttgaaaacattgtactaagaaggaaagcaagccagccacaaaagaacacatattgtacaattctatttgtccagattaggcaaatctacagtgacagaaaaatcaatcaatggttgtctgaggctgggggcaaaggcaggtggggggagtaggaggcagtggctaaggggtgcggatttctctacagggtaaggaaagtttctaagagtgactgtggtgatcagtgcacagctctgtgaatattctaaaacccactgaactgcagatttcagcaaataaattgaatgatatgtgaattacattttaataaagctgttatttaaaataataataataaggagctgggcacaggtagtcatacctgcctgtaatcccagcaccatgggagggtgaggcaggaggatcacttgaggtcaggagtttgagaccagcctgagcaacctagcaaaatcgtgcctctacaataaaaaaaaaaaaaaatttagctgggcatggtggcacacgtctgtattcccagctgtttgggagactgaggtgggaggattgcttgagactaggagtttgaggctgcaataagccatgatcatgtcactatactgcagcctgggcgacagagcaagactctgtctgtaaaagggacagaaaagggctgggcgtggtggctcatgcttgtaatctcagcattttgggaagccgaggcaggcgaatcatctgaggtcaggagtttgagaacagcctggccaacatggtgaaaccctttctctactaaaaattaaaaaaattagccgggcatggtggcggattcttgtaaatctacttgtaaatccagactagcctggccaacatggtaaaaccccgtctctaccaaaaacacaaagaagtagcctggagtggtggcgtgtgcttataatcccagctactcaggaggctgatgcaggtcaattgcatgaacctggcaggtggaggttgcagtgagccgagattgtgccactgtactccagcctgggtgacaaagtgagactctgtctcaaacaaaaaaaaattgatcagataaaaaaattatgaaacgatggcacaaataagatgttaaaatttgttccaaggagaattccaaaacccacacatatctgagaccatcaagtatgatgaaatatatttgattactatatttaaaaataaaccgattgtatagtcaacaacaattgggcaggggtctcctcatccacagccacacaaacccgatcatgtggctatgcagctgaaaggcctgcatagcctagatgggactggtccaacttgagatttcattttatttggatttgtattttgagacggggttccactctgtcacccaggctggagtacagtggtgtaatcatagctcactgcagccttgaccaactggcctcaagagatccttctgcctcagcctccctaatacctgggaatgcaggcaggttccaccatgccaggctattttttttttttaatttttgttgagaaagaagtcttgctatgttgcccaagctggccgcaaattcctagcctcaagagatctgcccacctcagcctccagagtaactggaaccacaggaatacacaaccatgcctggctatatttattttcctaaatttctttcttctacttttgtagagaggaggtcttgctattattgcccaggctgctctctaactcttggccttaaaaggtactcccatctctgcctctcaaactgttagaactacaggtgtgagccactgcacctggcctgacctgagatttctttaatctagcatcctttacttagtaggattgggaaaggcagcagtggttttttttaattacttaataattcagtttgaatcaaactcaaccttgacccctgccttctctcacaccccatgtccagtctgtcaggatcctgttgacagtcttcaacatgtctccaggctctgatcatctctcaccgccaccatgaccctggtcaggaccactatcatctcccacctggatgtggtgacagctcggcctccctgcttctaccaaaatcttcctatagtctttcccaactcagcagccaggggtgcttttaaatagggagacagatgatgtcacctgtctgctcagaaccttcccgcagttcccatctcagtcagagtaaaagtcaaagccccagcaataacctcccagggcttacacaatctgtactgatctcagcccagctactccctggcctcctcccctgcttctcttcctccctctctctgctgcaccagactccatcctgagccttagacacaccaaggagttccctcctaacatcttcactctgttgcttctgcctgcaatgctcttccctaagcaccctggccagctcctttccctccttgaagcctttgctcaattttcacttatgaggacaaccctgaacactctatttaatattgccatctgtccccacttccaccatgctcactcatttgttctttcttttttttttttttttgagacaagacctccctctgtcacccaggctagagtgcagtggcacaatcacagctcactgcaactttgaactcatatgctcaagcaatcctcctgcttcagtctccttactagctaaaactacaggtgtgtgctaccaagactggtttttttgtagacagggtctcactatgttgtgcagactggttttgaactcctgggctcaactcatcctcccacctcagcctcctaaaatgctgggatcacaggtatgagccactgtgcctggctttgtgttcatttcttcttgcttcttttacacagtaccctacattgagtggcttaaaacaccacaagtctactatctgacagttctgaagctcagaaatccaaaataggcatatcaaggctaaagtcaaggggtcagtagggctgcattctcctggagggcctagagagaatgtgttcccttgccttttccagcttcatgaagccacccacattccttggctcatggctcctaactccgtcttcaaagcaagaagtggagcatcttcaaatatgcctctctcacctctgcttccatcatcacatctcgtccaattctgactcttctacctccctcttgctattataaagacccttgtgattgcttggcatggtagctcacacctgtagtcccaacaccctgggatgccaaggtgggaggaatgcttgaggcctggggttcaagaccagcctgggcaacatagtgagactccacctctacagacatagtagtaataatgaatattagccagtcgttgtgatgcacaccagtagtccaagctacatgagaggctgagataaaagaattgctttagcccaggagtttgagaccggtctaggcaacataaaaagatggcatttttataaaaaataaaaaaaattatctgggcgtaggtggcatgcacctgtagtcctggctactcaggaggctaaggcgggaggattgcttgagcccaggttgaggctgcagtgagctatgatcacatcactgcactccagcctgggtcacagagtgagacactgtctcaaaaatagaaaacaaaagaagagaaagacacatttggtctctgcccctggtcctggcacagagcttctaaagctcttataaagtcctcagtgatagaggtgataggagcatcttttgtttcaatatttggtcttagtcctaggtttctagcacaagatcctctttggatcaccctaccccctacttcctaccccatcccctacaaaacaacccaattcttctccttaatggagctatattacaaaaagttgtactcatttatattttgaatttcattcattaaaattttgtggaaatttgttttctctcttgttatacctacatgccattcttgttttctctcttgttatacctacatgccattcttggttttgtctcttagtctttgaagcctaaaatatttagcatctgtccctttaatgtgttgacctttggactaaaggaactgggaggactttggactggaagaaagaagacaatatgacaaccgctctcaaatatttgccggactcaacagggagctggatccatccatcaccagggaatctttactacggaacactctcctacctatgaagaaagaggtagctctgtctctacaaaaacaaacaaacaaaattaagccatgcagggtagtgtgcgcctgtaagtccagtgactcaggaggctgagatgggaggactgtttgagctcaggagcttgagattacagtaagctatgattgtgccactgcacttccaacctgaacagcacagcaagagtctgtctctaaaaagaaagagaacagacactctgcagaatgggataaaatatttacaaatcatatagctgaccagagtttattgtttaaacttttaaagagacaaaagacttgaatagtaggccaggcatggtggctcacacctgtaatcccagcactttgggaggccgaggtaggcggatcacaaagtcaagagatcgaggccatcctggccaacatggggaaaccctgtctctatgaaaaatacaaaaattagctgggcatggtggcacgcacctgtagtcccagctcctcaggaggctgagccatgagaatcacttgaacccaggaggcggaggctgcagtgagcagagatcacaccactgcactccagccaggtggcagagcaagactctgtcaaaaaaaaaaaaaaaagacttgaatagtaattccaccaaagatatagaaatggccaataagcacataagatattcaaaatcactagttattaaggaaagaaaatcagtcctaaaatgagatatcacatcacacctactagaatggctataataataatgaaaagataacaagcactggtgaagaagtggagagattagaacccttgaatattctctctaggaatgtaaaatggtacagtcactgtgaaaaagtctgtaagttcctcaaaaagttaaacacagaattgccgtatgactaagcaattccactcccaggtgtataaccaaaagaattgaaaaaatgaactcagaaacatgccgagtgctgatgtgcaagtgttgatgttggctcgggacaagagaagaaaggaaagtccaaggacagtatttactgcagcgttaatcacaataaccaaaaggtggacaaaccccaggtgtccatccagagatgaagggataaacaaaatgtgacatatacatgcaatggaatattattcaaccacgaaaaagaatgaagttctgatcaatgctatcagatatattgttacaacctggctgaaccttgaaaacatttggctaagtgaaataagccacacataaaagggcaagtattgcataattccttttatatgaggtgcccaaataaggaaattcatagaaacaaaaattagattaagaagttaccagggtatcagggaggagagaatggaaagttattgcttatttggtacagaatttgtttgggatgatggaaaattctggaaatacatagtcatgatggttgtaaaccttgtgaatgtaactaaatgccactgaattttacacattttaaatcaatcctttctaaaaaccaaagagaaatggaatggtatatattacctatcaaatgctgtgctggatacattatagccattatctgattaagcttcatgaaagtctgtgagtcattcaaggccaagtatctttctcaaagtctcacagctaggaacgggcagtaaattttttcactagacaatgggtacttttctacataagggtcaaggatcatctgccagggttatttaatacaaaggagattttcacattagaaagcagattattaatacaaccaataataatagtaacatgccttttgcatacattatctccttaatcctcacaaataggaaagaaagaacctaagacatcagagagccacttaggattaagaatgcaagctgcccccaatatgcatcctctgtccttaaagacctgagctatgaacatggaaaagattgaaaaacactgccttcaggtatgaataaacatacattagatctgagtaagaatgcatcacttagggggaagggaagcagatgcttatctattttgtcttatctactgataactaaattcagacattgtaataaaagtaatacaaatgttataaatatattttctcttaatttttaaagagcaacgattacagtctgaaaaactgtcattcagcgactagtgccatgctgaggccaaatcttttggttttcaatatccagctttatcatgtcacaattaccttcagattcttttccacttagattgtaaaaatgcacatgaactcaaaactctaggtaaatctataaacctatacctatgaatcaacctttaattcaataaaaaatacactttctctacacacactttctttcccttttttatgtgcattatcttatttaatcctcaaagcaattctctgagttaggagttttttttttttaagggatacatgtgcagaacatgcaggtttcttacacaggtatacacgtgccatggtggtttgctgcacccatcaacctgtcatctacattaggtatttctcctaatgttatccctcccgtagcctcccacctcacacaggccccagtgtgtgatgtttccctccctgtgtccatgtgttctcattgttcaactcccacctatgtgtgagaacatgcagcgtttggtttcctgttcttgtgttaatttgctgagaatgatggtttccagcttcatcctgcaaaggacatgaactcatcctttttatggctgcatagtattccatggtgtatatgtgccacattttctgggagtgtaaattagttattcctctttttttaaccttaaaatttgaatttatggagcattaagtgcttgactgtaaaatcaaaaagcaaaaagagatgtgaggtcaaagaaaggagagacagtgaaaaatgggccaggagttaaaaagtaaaatttttcagtaaagaagaacagttaagatggttgttcatgttgttattgaaacaaaagaggtttggtctaggtcctgctgctcactgcatagaaacccaatgacaagtattgctaaggaagaaggctgtaacccggtgctgcagccaaggagagggaagctcagtctcaaatccatctccttcactgactaaaactaggagtctatttggcaggaagaaatgcaacaatgtataagaaaacaggaattagggaggagcaaggaagcatctgggtactgtgatatggtgaatttcagatctttgatactttctgaagatctttttttgaggagggaaggcagataagtatagtttcaagctttaacagcagggttaaatttctacgtttatcgtctatgggactaccaggctagtttcaaattaagcaatgattctataggtcctttttgttgttttaaaatctgaaacaattgaatgtatgttatatgctagacctaaagaaaatccatttcatgtgctaaaaaccagagtagatcaaagtaaaacctgttacaaatagcctatgagtatcaagtttgggaacactatgaaaaattccaaaaaaggtaatcaattcataaaacttacagatgaacaaatgaatatttcagaattcttatcagtactaagtatgaacatgattttatcaatattttcattactaattatacaataagaacctgacttctgactattctaaggtataaatgtgtactttaccttaaataggaaaatgtgttgtatatccattttgagattcattacaagattcacagaagagaaaactgatagccctgtatcgattaaaagcatttttttaagacagttttgctcttgttgcctgggctggagtgacatgacaagatcttggctcactgtaacctccgcctcccaggttcaagtgattctcctgcctcagtctcccgagtagctgggattacaggtgtctgccaccatgctgggttttttttgtttttttgtttttttttgttttgttttgtttttgcatttttagtagagacggggtttcaccatgttggccaggctggtcttaactcctgacctcagatgatccacccccctcagcctcccaagagatggaatctcactatgttgcccaggttggcctagaactcccaggctcaagtgattctcccacctcaggtttgagagtggctgggacaacagggtgcaaacccagatgagggtaatttttgtaacaaagggagttaggaaactttctatcagagaaacctcaaggcccagatggtttcactggcatattttaccaacttactaaaaaaaagaatgtaactaattcctaatgtcacaagcagacaattactgaaaactgactgctaaaaacatgcaattcacttggacacggcctaacgtgtatacacatattcacataattacgggccagaaggtttactcaaaacactttcagagttctctagacctgataaagctatcctctgagagaaaataaacctgttaggcaattgcaaattaaaaccacaatgaggaaccactgcatatcaacttaagagggtaaaaataagattgaccatacaagtattcacaagaatgtcaaccaaaactctcataccctgctgatggagatgtaaaataatgcaggtgccttggaaaacagtttggcatttccttcaaaagttatagatcccagctattccattcccagatatctactcaagagaaatgaaggcctatgtccacacaaaaacttgtacacaaacattcatagcagctctacctgcagcagccccagccccaaactggaagaacccaaatggctatcaacaaacaaagggatgagcaaattttgacccatgtatacaacagcgtattaatcaacaacaaaacagaatctcctactgatacatgcaacattgtggatgaatttcaaaacaatcatgtgaagtaaagaagtcacaatagtccctaccccatgaaaatagtccacatttaatcatatcatatgatatcatatatatgactttctagaaaatgcaaattaagctaaaacggaaaatcagcatgttgcctgaatactgggcagggtcatgaattacaaggggacatgagaaaacttttgggggtatggatatttcattatctcggttgcaatgaagatggtttattaggtatgtacatgtcaaaactggattttatacttcaaatgtttaatttattacaattacacatagataaaaaaattaagctgactatatctgcatttgcctaataggtttattttgcaacactagaaactgggattgaattctaaattgtgccacaacttgtgcttatacttttacaaacatgaatgactattttacatatcccctgaattgtgtgagttgaccttatatccacatttttaaaatgttttatcccagtgacttatttacaaatatagatgtccatcaagaactaatcaataaaatactatttaagaagttaaagcaactgataaactttaattttaaccacaaattttttttattaaaaaattgcattcacccttattaccttgaatgtgatataatcataatcaggatcttctgattcttcctttactgtcacagctgccacttccagggaaatgactataaaagcaaatgaaattatatgattgcatgtcagggctttcagctaaactgtgtagcgaaatcctctccatgctccctataaatacagcaatgaatacccattttaaataaagactttaaaagtctttgaaaggacaaaagttcaccacgtgtagcagagtgtaggaatcacctatagtcccaaccgagaaaaagttttaaccatttattaatattctgcaattatttgctgccaatttttttctccagcaaattcttatctttagaattaaagaaaatttagtcacaatccatgttcactgaatattaaaactactattataaaccactgttatatacatcagttttaataactcaatattccagagtagagatggtataatttttggcaatttcaataatgagatacattgatttttttttcctcctcataaatctcttctattaacaagaggacaaagcacacctttctgcataaaggtttgcccacaattaggacaggtaatttgaagccacctttgtggccagatacagaagagtgcatattgggtaattcctctcatttgaaggtcaaaataggcaaatgaaatctttgttattgaatatgtaggctgggtgtggtggctcatgccttcaattctagtactttgggaggccaaggcaagcaaatcacctgaggtcaggagttcaagaccagcatggccaacatggtgaaaccccgtctctactaaaaatacaaaaatgtagctgtgtgtggtggtgggcacctgtagttccagctactcgggaggctgaggcaggagaatggcgtgaacccctaaggcagagcttgcgggtgagccgagattgtaccactgcactccagccggggcgacacagcaagactgtctcaaacaacaacaacaacaacaaaaaaaaactgaaaacattaatgtaagcgtagtaaactaaggaataaatttttgtgacaattgacagcagatgagaatgactatagttaacaacaatgcattgtacattccaaattagttagaagagaggacttgaaatcataaatactcaaggtgatggacaccccaactactctcacttcatcatgacacagatgatacatataacaaatatcacagttaccctataaaaacctacaaatgtatgaactaaaaggttaaatccaaaaaaagtcttgtaagttgcagaaaagtagactgtagcaactgtacgtattttcttcctttcctgctatgaatgtgtttgtatgcagattatgtatttgcatatattaactattcccttcttctatgcgcagtattttacagaagttttattggaggtttcttttccatttgtccattagactagagattactcaaataggttaggattgaattaagagtaagtgatacgcctcatgactagatagtcagtctcccagagatgggtgtggctgttggaacactacgtctcctcattttgagcagatggtaaaaactgatttctttgtaggaagttgcactctgttggatggaacagttgtgctgttgtacagaaagtcaaatgtgcagggaagggtgtgtatatttcctgagtagccagagggcagccagggctagccattaaagctgatgtctcttagttgcaagcccaccctctgggtttctggtgaagcttgagctctgcacagcaactggctttgcgtgagtctctaccacaagaacacactatgcggagacaataggctagagaaggggaagggatctgtgccttctttttgtctccttgtctgcaccctaatcccatcaaggtcactccttggtaccgtcattcagcctggtgaatgaaggccctccaataacaagatatgtgtctggttgacaatgtctctgacactaccgacagcttcactatgccccaaagccgccagtgccaaccacacagtatcccacctccaaagtcaaaatgagagtgggtgcagtggcagccatgacctagatttgttccttagacaccttagtgttctaatttttggcggaaggccaaggcaggtggatcatttgaggtcagaagtacaagaccagcctggccaacatggtgaaacccagtcgctactaaaaatacaaaacttatctgggcatggtaatcccagctactcaggaggctgaggcaggagaatcacttgaacctgggagacgacggttgcagtgagctgagatcaaaccactgcactctagcctgggcaataaagtgagacttcatttcaaaacaaaacaaaaaataataatacttctatggtttcttgcagctctcccaaaatacatttacatacataaaagctcattcacatacatgcacacacacacattatcacagctcttcccctctccccaacaattcattccagatgccattagatggtgctaagtgtggcaggtgattgccccgggaagcacagcaagatgagaaggtttaggaggagcaagagaagttgccaagggcctgggcagacagaggcagatgaggggcaggcaaggtggtaacagcctaccaaagagtgtcccatgtgagtaaaggacatgggctgagcagcaggaggctcaatggtggcactagtacacaagataaatactgggtaaatgatgaaataaatcagtaggttgagaatatctgggtggcatggttctatgaaagcattgtaaataggaaaagaaagaaagaaagaaacaaacaaacaaacaagcaaacaaacaaacccaagccctggatgttaagaacagaagcgaagatacaggtacgagcttttggccttcaacatgtgtaagtacacagacaaatacagatgtaaatgtgtgcatgcacacgatgattttccttattgtgctgactgtattgtggttacacaggccaatgtccttgtttgtaaaaattacacgtggaagtagctgagagatagggcattgtgctggcaacttactgtcaaatagtacaggaaaaagtttattgcaccatctacatggatgctttctggagtctttctgttagcttgaaattgcttcaaactgtaactgattttataacaaaaattttaaggaattacagtattatttatctctcctacatcaagcttttctcttgtagtctatcttacaggtacttccatatgaatataaacagatctattactttgtgtttactggcaacatggatggaatttccagaatggaacagtaggttaattatcttttttataaggcagcaatgggttaaagaatacatgcatcttaaaataatagatattgtcaaagtaccatgcacaagatagctacagtttatatgcacataaacaatgcctcaacctgcctgtttttccaaaccctttgctaagactgagcataagcaaaatttactgtctgccaacctgctaggtgtcaaacattttcatttttagattgttatccccacttctttaatgagattgagagtttcttgagtctctgctcatttattttgtggtttgcttcttttaaaacaacatatagatggggtcttcctttgttgcctaggctggattcaaactcctgagtgcaagcaatcctcccatcttggcccttcaatgactgggattactggtgtaagccaccatgcccagcctggatttgttcttcgtaaatcaaaccctttgtcatttcttgcaaatagcctaccctttctcttacacgtcctttgacacattttagatggtttagccatacaaaacatttcaattttcagttaaatgtaggcttagaaaacatttcaagaaactgaagtgtttcttttttcacctgcttttaatctaaagtcttattatatctggattttaacatttcttaaaagtaatgtcagattataaatgtttggattttattcattttctaaatgattctgactggtttcctacatatataatatgacctgcaaaagaagatgtgtcctttactttctaattatttgcaactaatctgtactggtttatacatctaggaaactgatgagcaactggtgggagtgtgtatctttttcatatgaagcatgcttctagtggtttactattagacaataatgggttggcatttgcaataatattccaaccaattatattaaggatttctgctgctttttcatgagatacctagatgatacattatttctagttagttcaataatatgagaaaatgaattaagattttttataaaattatcctgtgtttctggataaatcctaaatctgaaattcactgtagaatataaatttttatattttagagatagaatcatgctctgttgcccaggctggagtgcaatggtataatcctagctcacttcagcctccaattcctggacccaagcgaccctcttgcttcagcctcctaagtagctgagactacagacatgcaccaccacacctgtctaatttttgtattttgatagaggtggggttttgccatgttgcccaggctggtctctaactccttggttccagcaatccacatgccacagcctgccaaagtgctgagactataggcatgagtcatcacactgagccataagatattttttcaactcatgtgaaagcatagttaaaagccccacaatggcaggatctacaacagtgaaaattcagatataacgcaactgacaactggctcccaccctctgcaagaggttaagcccagagacattgactatttttcaacaatgtaaaattgtgtttcatatgattaaaattttggaccccacatataacctaaagacaggttatatagcttaaaggaacatataagctataaatcccttaatatacaaactcgtaccaggcacggtgatgcatgcttgtaatcttagcactttgggaggccaagttgagtggactacttgagcccaagagttgatttttgaaaaaggttttatggcaagtaagcagagaaggaatggtcttttcaacagatgctgctggtacatcacatgcaaaatggtgactttaaactcttacctcacaatatgtgcaaaaaataactcacaatggatcttacccctaaacataagagctaaaactataaatttcaggaagaagatctaagtctaaacctttgtgacattaggttggacaaagattctttagatgcaacaccaagagcatagtaataaaaggaaaacttgaaaaactgaatttcaccaaaacaaaagcttttgagcaataagggactccaccaagaaaatgaaacaactagccagacagaaacagtatgtgcagaatcttatttctgataaaagacttgtatccagagcatatcgagaactcctgtaactcgtaaaagaagaaaaacacaatttttaaatgggcagacacttacatacacatgtcaccaaaaaaaaaaaaaaaagtaaaacaaaataaaatcttcatacctttgggttaggcaatggtttcttaaatatgaagtcaaggctggatgcagtggctcatgcctgtaattccaccactttgggaggctgaggcgggtggatcacgatgtcaggagatagagaccatcctgactaatacagtgaaatcctgtctctactagaaatacaaaaacttagccaggtgtggtggcacacgcctgtagtcccagctactcaggaggctgaggcaggagaatcgcttgaacccaggaggtggaggttgcggcgagccgagatcatgccactgcactccagcctgggtgacagagcgaaactgtctcaaaaaaaaaaaaaaaaaaaaatgaagtcaaaggcacaagtgccaagagaataatctggtttctatcaaaattaaaaacttttctgcctcaaaacgatactaccaagcaagggagaagacaacttatatattaagaataatgtagaattattagaattggagaaaaatatttccaaatcctacactacagcctgcatgaaagtgtgacatcctgtctcacatgcaaaattttttaaaatcatcaatcagggacttatattgaggctatgtaaaaaactcttatgactcaacaaaagacaaacccaattttaaaatgggaagaggatctaaatagacattactccaaaaaacatttgtaaatgaccaataagcacattgaaagataacacaaacctgtaatccaagcactttgggaagcctaggcaggtggattgtttgagcccaggagtttgacaccagtctgggcaatgtgaggaaaccccatctctacaaaaaaaaaaaaaaaaaaaattcagaaattagccaggtatgatggtgcacacctgtagtcctagctactcaacacatgaggcaggaggatcacctgagccaggaaggttgaggctgcactcagcccagatcatgccactggactctaacctgagtgacagagtgagaccctgtctcaaacaaaaaaaaaaaagtaaaaggtaacacaacatcaatagtcactagagaaatataaaacaaaacaaaacaaaataccaaaatgagataccacttcacacctattatgatggctaacatcaagaagacagtaagttggcagcaatgtggagaatgtgaaccctcataatgtgctgctggaatatacaatggtacagccacttgggaaaacaactggtcagtttcttaaaagttcagtgtaaatgtaccctattgctagtaattatactcctaggtatatatacagtgcatgaaacattaaggtatatgtccagacaaaaacttgctcaagtatggtcactgtagcattattcataacagcaaaaaatgaaaacaacagaatcatcaagtgatgattaaacaggcggtatgttcatagaatacttaatgctcagcaataaaaaggagctactgatccacgcaacaagcccactgagcctgaggtgaattatgctcagtgaaaaaaaactaatttcaataggaaacacactatatactcaatttctatatcataattcagagataggggtaataaaagcatcctaaaattagattatgatgattgttgcaaaatcatttaaaaaaatgtaagactgtaaatttactatcagtgaattaaatacttcagacaggtgaattttatggtgcatcaattatacctcaataaagctgctaaaaattaatcttttcaccacaatgagaataaaacaaaggttaacagaaaacaaaatgtgtgtgtttatgtacatattattttcccttttatccttacattgtgaagagtattccaatgatatttgttatttcctttcaaaagtctaaaaaaaaattggctccaaaaggtaccactctatcattttttctcttcaaatgaaatggctaaacttccataaaggaagctgaaatccttctcattctccaagggctcatgtaaatgccctcttcctcatgaaattcttcctgaactataaaggaatccaacccctaatgaacattcgcagcactttctctgaaccagtcttacagcagggatgtgaggctcttgccatggccattttacaaacttttctcccttccatgagactctgagcactccaaagccataatgcttatacacagttgtgcatcccctccccacccaaagctgtgcccaaaaatgccatgcctattcagtgacattaggtcaattaattctactcacgatgcttggaagtgggggcagatctatgatcttatgtagaaaacaagtagctgatctgaaaacaaaaaacaagtgtctaccttttcagctcaatgaacttttcttggattatataaatatcgaagcagcccatctgaaaatgtcttacatcatattctcaaagaaaataaaacagaaaccattaaagtgtattaaaatctagcaaaacgggataggaagccagccagctatcaaggaagcaaagcaatccctaatctagaggcttctttggctctaagaaagatctgcaataaaacaaaactaataaaactacacgtgaatacacaaaattaatgacagcataaatttaaatgaattgtcttaaccaagaatgtttaaactatattaacataagctgaatattcaaatttgtatgaataaaccattgatgggcatggagggagaaagcacctcacctattaataataaatgaaatcccagctgtgttctccaaaatccatttcagggttgcaagatcatagttctcagggtgtttaaaggcaacaccttccggaagcccctgtactatcaaagctgactggtcttgtagcatcttctcatatggtacaggtacctctgtgggtttttgtaaagctttccctgggagaggcaaaaagcagataaatgtcattaaattttaagattaaaaaacaaaatcatcactaccttattgtggcttaataaaggcatacatgatcttttgtaacatgtggttttaaaattacttaacactacagcaccctattcacatgtaagaagttctaaacctgacactgatccaaagggccaaaatgtaaagtatattaaatatctgactttaaaaactacacaaaaggagagagaaatgtctgatttcttgcattattgtctttaagatggtcctactctggcgtatttcttgggttcctcctaaaaggaagtggaaagtcatccattcagcttgtgaaaatgttgttatatgactgttaagtcaacgacataacatagtctaccctttagaaaactctatcaggtatcttttataaaatataagtgtgttgcttttaaggcagcaaaagcagaaatagtcctcaactgtttttttccgagtgttgccatttctacaacatctacactcatctgattcacctgggttgtagactttattttatgcatctctgcaaccttttcttcttcttcaacacctgtaaaaaatattaaggtgcatatctattttcttaatatttatttggcttttagtaaaaatagtttttcctgtattccaatatttgtgatctgttatacaaacaaaaaataggtcaagtgaagtggctcacacttataatcccaccaccttgggaggctgaggcagaattgcttgagcccaggatttcaagaccagcttgagcaacatagaaacaacctatccctataaaaaaagatgaataaaattaggtgtggtggtgcatatctgtagtcctagctactctggaggctgaagcaagaggattgcttgagtccaggaatttaaggttacgatgagctataattttaccactgcactccagtctgggtcacaaaaagagaccctgtgtttaaaaaaaaagtcagggggaagatcttaaagggagcttttaagatacaaacctaaaataagagtaatttattggctataaatttaaatatgggaagattatcatcaggaaacaaattctaggcttacaaagtccagcacaataaccactagacacacgtgacacttgaaatgtggccagtccaaattcagatgtgctgtaagtgaacaatacacattgacttttgaaaactcagcacaaaaagtattccaaatatcccattaataatttttatattgatcaaacatcgaaatattttaaagtattaccactaaacgattttcacttgtttccctgtattttttaatgttataagtagaaagttttaaatcatgtgaatgactcgcattatatttagttctatttaatagcacttcactaaatcccagaaaagggctcagaattctcctgaagaatttctacaacttcctcatgaaactattgattatgtttcagaagaacactattgcaaacaaataaaaggtacttgagaattaggtacaaaaacccttctccatggtatcaaattagtagcaatgtaaacaaactataaataccaataggcggggactacaactcgcaacgaggacaactcccctaatgcttagttccaatcagtggagaaccatgtaagccacggagcacagggaggggagaataaacacagctgcccacgagattgtggtatttgtgggtcagagggcaggtgatacacacacaaatcaaaacagcattattagtataaagaaacacacaatcaaggacttaacatttctcaaaattataatattggcaaaatttaaaaaataggttactaccataaagcttggaagattataacacaggtggtgaggggagggatacggtggtgaggggagggacacagtggcgaggatagtttttttaagaaactaaaaatactactgggaataggaattagtgaattagcaaaatttttaactcactagtaatctgctcaatttaacatgaattgaatctaatctgacaacgcaaatttaagtttaaagcttagtggcatacagacatctgtgggagatactgtaggttcaattccagaccaccacaatcatggaagtataaagtgaagttacacaaatgtcttcgtttcccagtgcatttaaaagttatgttgaatctttctttcacaaaagatctctgggaggtatgatgctattggatagcattttacacacagtggaacttctttccaaatcagaatcaatcctctgaaagcctgccattgctttatgaagtaaatttatggaatattctaaatcttttgtcatttcaacaatattcacgacatctacaccaggagtagattccatttcagagacgactttctttgctcattgtaagaagcaactccttatctgttcatgtttgatcatgaaattgcagcagttcagtcccatctgcaggctccacttctttttttttttttttttgagacagagtttcactcttgttgcccaggctggggtgcaatgacaggatctccactcactgcaacctctgccccctgggttcaagtaattctcctgccccagcctcacaagtagctgggattacatgcgtgcaccaccatgcccggctaattttgtatttttagtagagatgggctttctccatgttggtcaggctggtctcaaactcctgacctcaggtgatcccacctcgacctcccaaagtgctgggattataggcatgagccactgtgcccagccagcaggctccacttctaattctagttcacatgctatttccaccacatctgcagttccttcatcctctaaaatcccgaaccccttaaagtcacctatgagagatggaatcaacttcttccacagtcttgttaatgttaattttgttctcttcccatgaatcacaaatgttcttaatggcacctagaacagtaaatctttcccagaaggtttttaatttactttgcccagatccatcagaggaatcactatctctggcagctatggccttacaaaatgtaattctttctttttttgagatggagtcttgctctgttgccaggctggagtgcagtggtgcgatctcggctcactggaacctctgacttcctggttcaagcgattctcctgcctcagacacctgagtagctgggattacaggcacacaccaccacacccagctaatttttgtgtttttagtagagatggggtttcaccatgttgatcaggctggtctcgatctcctgactttgtgatctgcctgccttggcctcccaaattgctgggattacaggcatgagacaccacgcctggcctacaaaatacatttcttaaagaataaaacttgaaggctgagtgcagtggctcacacctgtaatcccaagctctaaagaaggccaaggtgggcagattgcttgaacccagaagtttgaaaccagcctagacaacatggaaacaaaacatctctacaaaaaaatccacaaaaattagccgggcatgctggtataccacctgtggtcccagctattcagcaggctgaagtgggatcacctgagcctaagaagactgaggctgcagtgagctgtcattgtgctattacactcaagcctgaacaacagtgagatgaccttctcaaaaaagaaaataataataatcataagacttgaaattactcctaaatccatgggctgcagaatggatgttgcattagcaggcatgaaaatgacattcatctctttgtacaacctccatcagggctctcagagggactgggtgcagtgttaatgagcaataatattttgaaaggaacttttttttctgggcagtcagtctcaaaagtaggcttaaaatattcagtgaacaatgctataaagagatatgctgtcatccaggctttactgttccactgatagagcacatgcagagcacatttagcatagctcttaagggtcctagagtttttggaatggtaaatgagcactggcttcagttaaagtcatcagctgcattatcccctaacaagagtctcagcctgtcctttgaagctttgaagccagtaatggaattctccctagctagcaaagtcccagatggcatcttccaatataaagctgttttgtctacattaaaaatctgttttttgagtgtagccatcttcattaattatctcagcgagatcttctgaagaacttgcagctcctacatcaagcacttgctgcttcacttcgcacttttgtattatacagactgtgtctttctttaaaccttatgagccaacctctgctagctttcagcttttcttttgcagcttactcacctcctctcagccacgacagaattgaagagagttagggctttgttctggattaagctttgacttacaggaatgttgtggccagtttgaccttctatccagaccactcaaagtttctccatatcagcaataaggctgttttgcttttttatcatttgtgggttcactggagcagcacttctcatttccttcgataacttttcctgtgcattcaccacctggcaaactgttcggcctagctttcagctgccaacatgtcttcctcactaagcttcatcatttttaacttgatttaaagtaagcacactgcaactctttcttttacatgaacactgagaggccactggagggctgttaactggcctcatttcaatattgtgtctcagggactaggctggcgttaggagaggaagtgatgggaaaccacctgattggtggatcagtgagagcacacaacatttgccaatgaggttttccatcttatacaggtgcgttcatggagtccaaaacaattacagcagtaacatcaaagctcactgatcgcaggtcaccacagcacatataataatcatgaaaaagtttgaaatattctaagagtaaccaaatgtgacacagagaaccaaagagagcacacgctgttggaaaaatggcacaaaagacttgacaaaagattcccacaaatcttcaatttataaaaactgcagtatctgcagggctcaaaaaaatgagttatgcctgtatgtattctgtgcctatcgccctgccttttttagttccctttcagtgtttcactcagttaacgtgaaacctatcgatagtgttaggttacacacagatatgaaaactgtcatactgtgaaaggccataagtattaacaccctatagtaaattttaatactgtgttccaatgtcaaataagctcattgctctaaacaaggattacaaaacccactgaagattcagataaggtgattccactcagcgagttgagaactgtttaattctgcatcatacttaaacaaactcctttgcacagtgaatttcttgttttcagttcaccacctttatctagaactccgtatctgagtaagaacttttaatctattcaaaatttctctcccttcattaccttctctctaatgcatctcattaatccagagtgaagccaagcaaggagccccgtacaatcaacacttgccattgttcttaactcttcagtatctaccctgacatatcaccacttcggtgattccttttaagcattttgaaatgtcttcataaacatttcagaaaatcattcatagtttaggccgtgcacagtggctcacacctgtaatgcgagcactttgagaggctgaggtgagtggatcatttgaagtcaggagttcagtaccagcttgaccaacatggtaaaaccccatctccactaaaaatagaaaaaaaaaattagctgggtgtggtgccacgtgcctgtaatcccagctactcaggaggctgaagcaggggatttgcttgaactcaggaagcagaggttgcagtgagccgagacctcaccactgcactctgcctagacaacagaatgagactccatctcaaaaaaaaaattttttttatagtttaaacctcattttgctttagaagaaattatgactagtgttatctataaatatttaggtttaaaaacaatgaaataaaaatgataacaatacaatgcttacaatatttcacaaaatcggcttgaaaatcccttctggtattgaaaaaattgtgtcctctgtccttcagttctgaaggcaaagagatctgctttatactctgtgatgcaggccactttggccttaaacttggccagttctttaaactataataataacagcaaatattatgttaaaggcagacatttaaaagcaccatttctgctagatgaattaaaaaatctaacacaagcctgggcacagcacctcatgcctgtagttccagcactttgggaggccaaggcgggtggatcacgaggtcaggagtttgagaaaaggctggccaacacagtgaaaccccgtctgtactaaaaatgcacataataataataataataataataatgataacaaataaataaataaaaggccgggtgtggtggctcatgcctgtaatcctagctacttgggaggctgaggcaggagaatcacttgaacctgggaggcagaggttgcagtgagtcaagatcgtgccaatgcactccagactgggcaacagtgcaagactgttaaaaaaaaaaaaaatctaacaccattttttaaagttactactctttctaaatagatttttgcctgattttaagcaaaagacaccacaagatttataagaaaaaaatgcagaaatcccttgtaatctattacaggtcagattctccaagaaagagactgagatttcacaaaggcttgctggggagcactgtcaataacagcacccaggaggtgggaggcaggcctggctgaacaggcaaagtgctgaacagggatgcagctgcaccaagagctcagaagccagtgtggccctccccagggaaaaggtggacaaggtgactcgaacactcgcagcagctggggaaattactgccatcagaattgaaagaagggactgaaacccacactacagtattcagtacataatcccctcctccagaagtattaccccatctacacatagccagaatcacatttaggtgattacttactgactttcactaagaatatttctatgagagtcaaattatttaaaaacattatagagtacatagtattccattttatggatacaccataattcatttaacatcatttcaaaggtcagtgattccaattttccctcctaaaaataacattactgtaataacctgggaagcaaatatttatgtacttcttcaatgactttctcaaaaaagacatgagagtcaagaaaaaccattaagagtcaatactccaaatactcaaaatctactaaaatttgctttctaataaggttcataatatcctagcaaatgttaccatgtgacttttccagaaaccttgaaaaagggtatcttagtgtcataaacatactccactgattggtgttaaaattaaagagtatcgtagcataattttctgcaaattaccatttcttttgtctatttatcaaatgtgttagtgtacctccaactgacccatagaagtacgtcacttattttaggcatagaaaagccatttatggaattaaataattatataataattacatatattttgttttggttttaaaatttgtctcagtataactatttttgctcatctagaatttaactcatcacatgatgaagactatacgttgaagcttgtttttaccaaaatttttactttttatcaaatagcctattttctcagtatcatttgttgaaaactgtaagctttccagtatttgtttttgatttgtacaataaacgccctctaatttcttaaatggagatcatttctgcataatattgctttaaaatgttatcctcagtaactaatttagcagctagtgaggtgatcagaaatcttttgagccataataaagccatggtagagaacttctgagctggaggtgggccaacaactgccccagcgtgaagaatgatgagcctcggtaatttccttccgttgcacttacatgacatgtgctgtggctactctcctgtaaggaactattatttacttaccttgcggtaaatgagggtacattcttgcttcagtatccacactctaaaacaatcctgtcaacaaaggcaatgtttatgaaagagtaagcaagattcatgtactatccatagattagataaaacaagtctaccagccaaggaagagataaagtcagcctggatctgcttagcactctgacaagccagtgaaaaactcagcagtttctacaaacttaattataccgtgtaatatacaactaggaataggaggagaaatggtcttactaataatgctggtgaggaagacataaaggctgagaatagtgaaatgactatgccaaagatgagggaactgttaagaaactctaaggaagtgaatggatcttacgtggccttatggtattctttgcagagatcaatattttaaaaaaatattttattatcaacagaacagcatttcatctctaaatttttatttaacattaaagtcacaaattttgcctggttttatgatcacaaggcagaaacaagtcattcataaaataacaatatataaccaccaaccactctaaaatttctttaaggagataattttataaagttcttaaaacatttttttaatgccctaataagaaaacaaaacagatggccaagcacggatgctcaagcctgtaatctgagcactatgggaggctgaggcaggaaagtcacttgaacccgaggtcaaggctgcactgagctatgatcatgccactgccctccatcctaaaagagtcagatcctgtctcaaaaaaatgaaaaaaagcatccacaaactttgtcacacagagttctgtgaggttaagcaccacctaaatacttttcaaccacttaagaggaggaaaatgcatactcctgcttaaaacatttacatttaatatgtcggaaaacacctaaggccatgcatggtggctcatacctgtaatcccaacactttgggaagccaagacaggacaattgcttgaacctaggagtttaagacaaacctgggcaacataaagaaaccctgtctctacaaaaaagcttaaaaattagctaggccaggaacagtggctcatgcctgtaatctcaggactttgaaaggcagaggtggaattgattgagctccagagttacagaccagcctgggcaatatattaagacctcatctccactaaaaagcaaaacaaagtagccagatgtggtagcacatgcctacagtcccagctactctgaggctgaggtgggaagaccacttgaacccaggatgtccaggctgcagtgagccatgaaaaaaaaaaaaaaggttaaaaaaaaaaagaaaatacctaagtctgatactttttcttttttttttgagacagagtctcactctgtcgcccagactggagtgcagtggcacgatcttggctcactgcaagctccacctcccaggttcatgccattctcctgcctcagcctcccgagtagctgggactacaggcatccgccaccacacccagctaattttttttgtatttttagtagagacggggtttcaccgtgttagccaggatggtctcaatctcctgacctcgtgatccacccgccttggcctcccaaagtgttgtgattactggcgtgagccaccgtgcccagccacctgatactttttataataaatactatttccaactacatacccataaaaatataaattaattgtataactaccatgatagtaatataaaaatacaaaactacataatcagtactcaatatttcactgtaattatgcatatgataggcttttttttttaagtaaagagctggccaggtgtggtggctctcacctgtaatcccagcaatttgggaggccaaggcagacagatcacttgagctcgggagtttaagacaagccttgccaacattgtgaaaccccatcatcagcaaaaatacaaaaattagctgagtgtggtggcacacattgcagtcccagctactggaaaggctgtcaggagaatcacttgagcctgggaggcagaggttgcagtgagctaagatcgcaccactgcactccaccttgggtgacagagtgagattccggaaaaaaaaaaaagaaaaagaaacataaacagctaacactaaacaatttagaaagaggtggttaatgcaatagtgaatgtgtaagcagaagaaatatagatacacaatagtaaagatgccctaatgaccccaaattctgggaatcttctacatattgatacaataaaactccagccccatactctagtatacaaactcattctgagtaaccacaaatattatacataatttcaaaattcacacttacaaaacaaaggattgcctaaaataatggtagaaaattatttgagattcaaagtaaaaattaaacattctgaagcatggtaataaaatgtcatttgaaagccataactgctattcaagaaaaaaaaactactccttaaaactaaaaagacataaaattatatcttctacaaaaacaaatcaaccttatctacagcccagttctacccaactatggaatgtcagaatagaaggtctcaccatggactcaagagctgacatgaggaatgtcactaccatcctgctgaggactcctcatcttcaacggccagggtggacactgttactggggccatgatctttgtgcaagacaagtaataagaaaatcagtggtagaaatgtggtgttccaaatccacattcagagctctgaggatctcccactggctgcctaatttactgttttcttacctaagagaaaaaacaagactaaaaaactaagtatatgatttgcctgaaactctcatcagatagagaatctaccccctaacttcctatctagtgttatttcaataacattgggttaatatcacacccaaaataaatgcagatggcactcagaatcagtgaaatttctcccaagaaggaggaggaggagaggtgctttacaacccagtgatggactaccacagaccaatgcaggacagagccgccaagctccctctctcccctgcacatcctgacgcagcaaagggtgggtgcagtggactgaggatgggtggagagaagtttctcttcttactgtgaaaatagatcaccggcaccaagaaacaagtaagacgatttatattacagcatattgctctatttgaaaaactttttataatattttggtaataacaaagaccctcaaatgaatttcaaacactttaaatattcaacacataaacagaaaatattaaatgtcagcaaggatatcgaaaaactggaccctttatgcactactttttggaatgtaactggtgcagcccctgtggaaaatggtttggcagctccttaaaatattaagcatagaattatcacataatccaacaactccctttcagggtatatacccaaaagaactgagagcaaggactcaaacaggtatttgtacactatgttcatagcaacattattcacaatggccaaaaggtacaaccaaccctaatgcccatcagtaggtaaatagataagcaaaatgtgatatacacacatacatgaaatattattcagctgtataaagaaaaaacaattctggccaggttcagtgacttacccctgtaatctcagcactttgggaggccgaggcaggcagatcacctgagcccaggaattccagatcagcctgggcaaaatagcaagacctcatctctgtaagttttttttaaaaaaattctgatactgctatagatgaaccttgatagcactacgcaatctatgcatgtaacaaaattgcacttacactccacaaatgtatgtaaagttgttttaaaatggggaattcatcaaggaagaaatgtgaaccacggagaacagagaggagtgagacagaaaagccacccacccagaactggtgtggatcccaggggggtttccccacggcaggaaaatagtgagcaagagccactggtgactcacccttctgccatcgacttttaaaatcctgggcacagaaaatcccccgacaccctcccctcagggctccccagctgacacagagagctgcatggagtctgggcagagcctccagtcaggcccacatggaaccctaagggccttggacccctgagcaccacagtgccagctgctatagctctgccaccagaagaggccagactctctcacatgcccccaggataggggccatatctacagtgctgaggaggagacagactcacctcctgtctctactctacctcctgtagcggcctcacctccactacacctctcctggtagtgcccactggcctgggtcccagtgcagccacttaccctctgcctgagcactcaggctaattgcaactctgcagactgacctcccagaggtaactatcaggcctactgtttttggaactgccatggtccctgcctctacctctcctaggctagggagggactgaagagcccaagaactatcataggcttcttagcacaccacagctaccttacagaaagtgggcaaactgtatccacgtgggtccccctccctgctatgcctcactgggtagggtctcctgatctgggcccccagcacagccatcctgcacccccaccctgaaggattgctcattcaatggcatctctgcatctctctgagatggagctttcaggggtaacccacgggctctctgccattgccactgtagcagtaccaccactgctgcccttggcctggggaaagaataaagaccctgattgctttgccagctcctccagtgtgccacagccaccagatggagagaagcccagtttctcttctctgtgagcttccggcaacctgctcttcaccagaaggaggcccaggtttaatcccacagttcagccacctcacccttggctgaacattctcattggcagtggctctgcgtctctctggggtggagttcccagaggcaactgagagcccttttgccattactgctgcagtgatactgcccttgctgccctcaggctggggaagaaacaaagtgcctgagtgctttgctcacacttccagcaggccacagccaccatatggggggaagcccagtctctcttccctgttggccccaaatcccctgctcttctctaggcaggggtcccagcttgggcccacaatccagcttctccatttctgactgatcattctgattggcagagctctgcacatctctgatgtggtaccccaagagacaactgaaaggctttctgccattgccattgccaaggtccccaaccctgctgctcccaagctggggagaaaatgaaaagcctgagttcaccccagagctatggtgcacagggctatgggatgggagtgccaagccaagacctatggctagtactcaagtggaggaccagcataaaatcactgaaatgacagacagagaattcagaacctggatgccaatgaagatcttcaagattcaggagaaagttgaaacccatttcaaggaatctaaaaaattcagcaaaactattcaagagatgagagatgaaatagccttcttaagaaggaacaaaactgatctgataaagctgaaaaactcacaaaaagaattttgtaatacaatcagaaatattaacaccagacaagaccaagctgagggaagaatctcagagctcaaagaccagttctttgaattaattcagtcagacaaaaataactgaaaaagattgtttttcatgaacaaaacctttgagaaatatgggattatgtgaagacgccaaatctacaactcattggcatctctaagggaaaggaagacagaacgagtaacctggaaaacattttttaggatactgtccgtaagaattttcttaactttcctagagaggttaaaattcaaattcagaaaattcaggggacccctgggagatagtacacaagataaccatccccaagacatgtagtcatcagattctccaaggtctgtgtgaaagaaaaaatattaaaggtagctggagacaaggtgcaggtcacttataaagggaactccattaggctatctgcagaccttccagcagaaactgtacaagacaaaagcaactggggggcctatattcagcattctcaaagaaaacaaactccaaccaagaatctaatcacaccaaactaaaacttcataaacaaaagataaaacatatcctttcagacaagcaaatgctaagggaattcattaccaccaaacctgccttaaaagagattcttaagggtatgttaaacatggaaaagaaagactattactggccaccacaaaaaacacactgaagtatatgggctatttatactatcatgtaaatacacaatcaagtttacataacaaacagctaacaacacaatgtcaggatcaaatctgcacatatcaatattaacctcaaaaaagaatgtgctgaataccccactgaaaaggcgcagagtgacaagttaaataaagaagcaagacccaactgcatgctgtcttcaagagaccgatctcacatgcaaggacatccagaggctcaaagaaaacagatggagaaagacctaccaagcaaacagaaaacaaaaaagagcagaagttactattcttttttcagacaaaacagactttaaattaacaatgaccaaaaaagacaaagaagggcatttcatgataatcggttcaattcagtaagaagacttaactatcctaaatgttaattatatgcacccaacactggagcacccagattcataaatcaagttcctagagtcttatgaagagacttagataaccacacaataatactgggagactttaaaaccccactgaaagtactggacagataaccaaggcagaatatatttaggacctaaacttgacacttaaccaaatggacctaacagtcatctacagaacactcaagccagcaaaaccagaatgtacattcttctcacctgcacatgacacatactctacaactgaccaccacacacttggccataaggcaactcacaacatattctaaagaatcaaaatcataccaaccacactatttattggaccacagtgcaataaaaataggtatcaataccaagaagatctctcaaaaccatacaatttaataaaaaattaaataagcagctgctggtgacttttgggtaaagaataaaattaaggctggaatcaataaattatgtgaaactaacagaaacaaagatgcaacatacctatatcactgagaaactgtttaaaaaaagtgttaaagggaaagtttgtagcactaaacacccacataaaaaagttagaaagacaccaaattgagaacctaacattgtatctttttttttatttatttatttttgagacagagtcttgcccggtcacacaggctggagtacagtggagcaatctcagctcactgcaacctccatctccctggttcaagcaactctcctgtctcagcctagctgagactacaggtgtgtgccaccatgcccagctaattattttctttgtagtagagacggggtttcaccatattggtcaggctagtctcaaactcctgatctcaggtgatccaaccacctcggcctctcaaagtgcggggattacaggcatgagccactgtgccaggtgatatctagaggaaacagaaatgtaacagcaaatcaatcccaaagctagaagacaagaaatatcaaagctgaactgaatgaaacagagatcaaaaaaaaaaacactgtacaaaaatccagtgaaacttatttctgaaagaataaataagattgatagactgctagctaaagaaaaaaagatgatctacctaaacatgataaaaagtgacaaaggaaatattatcactgatgccacagaaatacatgaaaccatcagagactgttatgaacacctttatgcacacaaactagaaaacacagaagaaatggataaatacctggaaacatataaactcccaagactgaatcaggaagaaattaaaatcctgaacagaccaatactgacttctgaaactgaatcaataataagaagcttaccagaaaactctggaccagatggattcacagccaaattctaccacacatataaagaagagctggtaccagttttactgaaactattccaaaaaaaggaggaggaaagacatcttcctaactcattctatgaggccagcatcattctgaaaccaaaacctagcagatatgggaaaaaaaaaaaaaaagcaaattgggctgggcatggtggctcacgcttataatcccagcactttgggaggcagaggcaagcagatcacctgaggtcaggagtttgagaccagcccagctaacatggtgaaactctgtttctactaaaaatagaaaaaattagctgggcatggtggtacagggctgtagtcccagctacatgggaggctgagacagaagaatcccttgaaaatgggaggtggaggttacagtgagccgagatcacgccactgcactccagcttgggcaacaagagtgaaactccatctcaaaaaaaaaaaaatatatatatatatttatatattatatatataacatatattatatataatgcatatattatatataatgtatatattatatataatgcatatataatatatataatttatatattatatataatttatatattatatataatttatacataatatataaattatatataattataaattatatataatttaaatatatattattttcatttatataaatataatatatatttacataaacatatatttatataaatatatttatgtatttatgtaaagataaacataaatatttacatgtaaatataaatatatttaccaaactgaatccagcatcacatcagaaaacctaatccaacatgatcaggtaggctttattcctgggatgcatggttaaacaccctaaaaaactaggcatcaaaggtacatacctcaagataataacagccatctataacaaacccacagtcaagatcatactgaaagggcaaaagcttgaaacattccttttgagaaccagaacaaaacaaggatacccacgctcactattcccattaaataaaatactggaagtcccagccaaagcaatcaggcagtggaaataaataaaaggcatccaaattggaagagtggaagtcaaatgatttcatttcacaaatgatataattctatacttagaaaagcccacagtctctgcccaaaggctcctagatctgaaaaaaaacttcagtaaagtttcagcatacaaaataaatgtatggaaatcagtaacatttctgtacaccaataacatccaactgaaaataaaattatattcacaatagccaccaaaagaataaaacacctggaaacacagctaaccaggaaggcaaatgttctctacaatgagaattatgaaccattgttaaaaaaaaattagagatgacaaaaacaaacagaaaaacattcctcgctcatggataggaagaatcaatattgctaaaatggccctgctactgaaataaatttacttttgaattcaatgttattcctattaaactaccaacaacattttttgcagaattttttaaaaatgaaaaaacttatttgaaacaaaaaaagagcctgaatactcaaagctattctatgcaaaggaacaaagctagactcatcatactacccaacttcaaactacactacaatactacaatacctaaaagagcatggatactggtacaaaatagacacatagaccaaaggaacaggctagagaacccagaaataattaccattcaggacacaggcatgggcaaggacttcatgtctaaaacaccaaaagcaatggcaaccaaagacaaaattgacaaatgggatctaactaaactaaagagcctctgcacagcaaaggaaactaccatcacagtgaacaggcaacctacaaaatgggagaaaatttttgcaacctactcatctgacaaacggctaatatacagactctacaatgaactcaaacaaatttacaagaaaaaaacaaacaaccccatcagaaagtgggcaaaggacatgaacagacacttctcaaaagaagacatttatgcagccaaaaaacacatgaaaaaatgctcaacatcactggccatcagagaaatgcaaatcaaaaccacaatgagataccatctcacaccagttagaatggcaatcattaaaaagtcaggaaacaacaggtgctggagaggatgtggagaaataggaacacttttacactgttggtgggactgtaaactagttcaaccattgtggaagtcagtgtggcgattcctcagggatctagaactagaaataccatttgacccagccatcccattactgggtatatacccaaaggactataaatcatgctgctataaagacacatgcacatgtatgtttactgtggcactattcacaatagcaaagacttggaagcaacccaaatgtccaacaatgatagactggattaagaaaatgtggcacatatacaccatggaatactatgcagccataaaaaatgatgagttcatgtcctttgtaggcacagggatgaaattggaaatcatcattctcagtaaactatcgcaagaacaaaaaaccaaacactgcatatgctcactcataggtgggaattgaacaatgggaacacatggacacagaaaggggaacatcacactctggggtctgttgtgggttggggggaggggggagggatagcattgggagatatacctaatgctagatgacgaattggtgggtgcagcgcaccagcatggcacatgtatacatatgtaactaacctgcacaatgtgcacatgtaccctaaaacttaaagtataataataaataaataagtaaataaataaataaaaataaagccacacatctaaaaccatctgattttttcacaaagccaagaataacatacaataaggaaaggactccccctcaggcacggtggctcatgcctggaatcccaccactttcggaggccaaggcgggtggatcacctgaggtcaggagtttgagaccagcctggccaatatggtaaaaccccatctatactaaaattacagaaattacctgggcgtgatggagggtgcctgtaatctcagctactctggaggctgaggcaggagaatcacttgaacctgggaggcggaggttgcagtgagctgagatcgtggcactgcactccagcctgggcaataactcgaatccatctcaaaaaaaaaaaaaaaaaaggaaggaagaaaaagactccctattcaataaatagtgctgggataactggctagtcatatgcagaagattgaagctggaccacttcatttataccataaacaaaaattaactcaagatggattaaagacttaatataaaacctaaaagtgtaagaaccctagaagaaaacctaggaaataccatgctgtacattggccctggcaaagacttcaagactctaaaagcaactgaaacacaagaagttgacaaatgataccggattaagctaaagagcttcagcacagcaagagacactatcaacagagtaaacacacaatcaacagaatgagaaaaaaaaaacttgcaaactatgtttttcatcaaaggtttaatatgtagaatctatttaaaaaattgtaattcaccaagcaaaaaacaaaccttattaaaaatgaaaaaagaacatgaacatacacttctcaaaagaagacagacatgcatccaacaagcatattaaaatgctcaatgtcactaatcattagaaaaatgcaaatcaaaaccaccggataccatctcacatcagtcacagtagccatattaaaaaggcaaagaataatagatgctggtgggtagtgaagagaaagcttatacactgctagatggaatgtaaatttttccagccacttagaaagtactctggagacttctcggagaatttaaaaccaaactaccatttgacccaccaattccattatttggtgcataccccaaaacagaaatcattcaactgtaaagacacatgcatgcttatgttcatcacagtactattacaatactatttacaatcatactaagtactagtactattgtactagtacacggtactatttacaatagcaaagacatggaatcatctgatgtcctttaataaataaatggattttacaaatgtgtgtgcgggtgtgtacaaaatgtaatatattacacaatgtaatatagatatatactacacaataatgtaaatacacaatcgtatttcattgtatatatatatcattatatatatatacacacacacacacaatgaaatagtattcagccataaaaagataaaattcctttctttgcagcaacagggatgaacctggaggacaccgtgttaagtaaaataagccaggcataaaaaaaaatactgcacattctcactaatatatacaatctaataaagttgatctcataggagtagagagtagaatggtggttactagaagctagggtgtgcaacagagtgcaaaatgaggagaaaatggtcaattggcaataagttacagttaacaggaggaatatattctagtgcacagtagggtgactatggtgaacaattttgtattgaatatttcaaatggctagaaaagagagttttgaatgttctcaccacaaagaaataataaatcagatgttggatatgctaaatcccctaatttgattattacatatataaacacgtatctaaagctcacattgtaccccatctatatgtaaaattattatatcaattaaaaacaaaattaaaggcaaggtgtggtggctcatgcctgtacaaatcccagcactttgggaggctgaggtgggctgatcacctgaggtcaggagttcgataacagtcttaccaacatggtgaaaccccgtctctactaaaaatacaaaaattagctgagcatggtggcgggtgcctgcaatcccagttaccaaggaggctgaggcataagaattgcttgaatcctgctcaatgaaataaaagaggatacaaacaaatggaagaacattccatgctcatgggtaggaagaatgaatatcgtgaaaatgaccatactgctcaaggtaattgatagattcaatgccatccccatcaagctaccaatgactttcttcacagaattggaaaaaactactttaaacttcatatggcaccaaaaaagagcccgcatcaccaagtcaatcctaagccaaaagaacaaagctggaggcatcacactacctgacttcaaactatactacaaggctacagtaaccaaaagagcatggtactggtaccaaaacagagatatggatcaatggaacagaacagagccctcagaaataatgccacatatctacaactatctgatctttgacaaacctgagaaaaacaagcaatggggaaaggattccctatttaataaatggtgctgggaaaactggctagccatatgtagaaagctgaaactggatcccttccttacaccttatacaaaaagtaattcaagatggattaaagacttaaatgttagacctaaaaccataaaaaccctagaagaaaacctaggcaataccattcaggcattaccatgcccaaacctaggcatgggcaaggacttcatgtctaaaacaccaaaagcaatggcaaccaaagacaaaattgacaaatgggatctaattaaactaaagagcttctgcacagcaaaagaaactaccatcagagtgaacaggcaacctacaaaatgggagaaaatttttgcaacctactcatctgacaaagggctaatatatccagaatctacaatgaactcaaacaaatttacaagaaaaaaacaaacaaccccatcaaaaagtgggcgaaggccatgaacagccacttctcaaaagaagacatttatgcagccaaaaaacacatgaaaaaatgctcaccattactggctatcagagaaatgcaaatcaaaaccacaatgagataccatctcacaccagttagaatggcaatcattaaaaagtcaggaaacaacaggtgctggagaggatgtggagaaataggaacacttttacactgttggtgggactgtaaactagttcaaccattgtggaagtcagtgtggcgattcctcagggatctagaactagaaataccatttgacccagccatcccattactgggtatatacccaaaggactataaatcatgctgctataaagacacatacacacgtatgtttattgtggcactattcacaatagcaaagacttggaagcaacccaaatgtccaacaatgatagactggattaagaaaatgtggcacatatacaccatggaatactatgtagccataaaaaatgatgagttcatgtcctttgtagggacatggatgaaattggaaatcatcattctcagtaaactatcgcaaggacaaaaaaccaaatacagcatgttctcactcataggtgggaattgaacaatgagaacacatggacacaggaaggggaacatcacactctggggactgttgtggggtggggggaggggggaaggatagctttaggagatatacctaatgctaaatgacgagttaatgggtgcagcacaccagcatggcacatgtatacatatgtaactaacctgcacattatgcacatgtaccctaaaacttaaagtacaaaaaaaaaaaaaaagaactgcttgaatccaggaggcggaggttgcagtgagctgtgatcacgccgctgcaccccaatctgggcaacagtgtgagactttgtctcaaaaaaaagaattaaaaaaggaaaaatgaggtcatgagctaaacatctgcccccaaactatatggaaaggtatatgaataaagatcatcaccactcaccagaagagaaacgtgtaagaaaaaacttcagtagcaattagtactacggtaggaaacctacactgtaattgaggacttgctgaagcctgagagtggacaagcatgagagtgaaaatctccagggaggccagtcttagtccctccttctcacttttgagggttttatcgtcagaagccctaccagattcttacactagaggtagaaaaatctcatgtttttggcatagggaaaggaaatgtacccattctaaaagccacctagaacattctattcttcttaccaagctctgccatcagaaaactatttgagcaaagcataacctactggggttttgtcagagtttatatgacctaagttaagggaaatacccatcatcagagtgttgtagtcttcagtggggaagaagagaaatattcaacttcagaccacttgagcccttcatgtgagagaagaaacaatgcaactcccgttccctctagccttcctgttaaacctaagggggtgggaaaagaaatgtgcagcattttttaagatgacaagacagaggcacagactcactacaagacacaaaactcaggggctggaatggagatatccttctattctcaataaatgcatcaggacaaactgatgggagtggaagtaataagcagcctaggttttcctccctgtatctcatgctctgtgtcacagacgtgtcctctggaggacagagcacttctcctatgtaactctgaaagaagtaacatttttctgacttccaaaatacttttgctctaattcaattcagaaaactaaaatccactaaggaacatatttgaagaacactacaaatcacctgtagggaacccatagaaacacattaggaaatgtgatattgtgttgtgcacattttgaaggctggattattgggaggtatattttgttgacaagttctgagaacatacaatccattaggcagaagctacatagaaaaatgagctttcgcattaaaaagtatggaacccagatggtacaataaaagtttagaaattgtacactctgtggctgtgttgatgttttatattatttgatgtgtaaatgagtgaagaggccagattatccagaatgtacctgagataatcagagataaccaaggagaaggtaaaattaaaatgatggtggtaattatttggagcactaaagaacaaacattgataatgtgagatctgttttttcccagatacatgaaatacatttctttgtcattaagatgaacatactttaagcataatgcttctgttatgcttaaaaatacctttttttcagccaggtgcagtggctcacgcctgtaatcccagcactttgggaggcccatgcgggcggattacaaggtcaggagatcgagaccatcctggctaacacggtgaaacctcatctctactaaaaatacaaaaacttagccgggcatggtggcaggtgcctgtaatcccagctactcgggaggctgaggcaggagaatggcatgaccccaggaggcagagcttgcagtgaggtgagttcacgccactgctctccagcctgggcaacgaagcgagactctctctcaaaaccaaaaaacaaaaaaccttttttcccaagctaccattggacttttagccaacaccttattccttttcttcaacattttcatattcctccaggatcagaaatcaaagccccatgacctcatcagctgtaattcggccttcattcatgtagtgatgttcctcactgtggtggatgcttggcctccagatatgcttgaatcactgcacttagggaatgagttcaaatttaagtccttgtcctacataaacagagtgaggatggacctatgtatctgtaacacctgtctcctgagtatacaccaggccagcaccatcagccccagcaacttctgtttggcaaggcctaaacagaaattcacaagtaacattatcatgtcatcttttttctttttcttttttttttttggtccatcaatttgtctttcagtcataacatagtattctttactgtggcttcttctaatgctaatgtgacccagaccagtctacccaagggcagcaaatactgttcactttctcccatgaagtccttcatgagaaaagtattttttactctgacattatccagggatgtcttcattataggaattacactgcattcaattgcacacatggtgatccttgtgtccaggcatgagaggcaatctcagcaccttcacagcatcagcatctctccacaagccttcccagagaaaagggctgctcagaccatcccgctgttagtgagctactgtctggtcatgtgctgggtggacctcatcatctcatcttcttcaaccctgctgtggacgtgtaacccagtcttcctgagtatgcagaaccttgtgggcgatgtctacgccactgttgttccactggaacaaatcagctctgataaaaatatagttgacattctccaaaatatgcaaagtgctataaagctttaacaagttggcgacggaaaacatttctaaaaaatagtcttctcctatatttaaattgttcaagtagccctggagttctttttatcttatttaataaaatgcatggaatcatacttttattatatttatatgctttcaaaactgatgcttctaaggaccatgtaatttctttaattctagtgtctaccatgggttgacatttctgtatcaagtttcttacatttttattttcattttattttggtagtagaaaatgtttctctcaaagtatactcttccttttttttttttttttttttttggcctgtagctgaggctggagggcagtggtgaaatctcagctactgcaacctccacctcttgggttcaagcaattctcatcctcagcttcctgagcagctgggattacaggcacgcacccccatgcccagctaagttttgtatttttagtagagatgggatttcaccatgttggtcaggctggtcttgaactcctgacctcttgatccacccacctcagcctcccaaagtgctgggattacagacgtgagccactgcaccctgccttgaagtatactcttaacaatcttctcttggtaatcaaattcctcaatgtttttacttttgaatatattttaatttactcttatttatgaaaggtactttagctaaatatccaattttagcttttatactatgcttgttcattagaacctccctgactggaaatatgtcaatttggattttacatttaatttagaatttattttaaagggttttaaatgaaatttatatgtaattagatactatatggttacacaatattttcccacatgtgctataattgacaaataaaaattgtatatatttaaggtatacaatgtggtttatgtatacgtaaatatatacaataaaatcactacaatcaagctaaataacatactcatcacttcccatagttactgttggtgtaataagaatatttgaggtcttctttattaataaaatttacctatacattaactgtagcctccatgctgtacattaggtctccagtacttattcatcttataaaacaggtttgtaccatttgaccaatatctcattctcccaagccacagcccttggtcactaccattctactctctgtaactataattcaagcccttttttagattccacatataattgagataatgcagtgttcatctttctgtgtctggcttatttcatttagcataacgccctcaagatgatccatgtggttgcaaatgtcaagatttttttcaaggcctgaattgtgtctctctctcacacacacacacacacacacacacacacacaatacgtatatgtaacatttcctttttcttgttgttgttagatataacaacaggctggagtgcaatggcatgattatagctcactgtaacctataaattttgggtataaattattctctcacctcagcctccaaagtagcaaggaccacagcaatacaccaccatgcctagctaatttgtagggacatggtcttgctatgtcacccagcctatggagtttcactctgttgcccaggctggagtgcagtggcacgttggaggcttactgccaactccacctcccaggttcaggcaattctcctgcctcagcctcccgagtagatgggactacaggtgcctgctgtcacccagcaaatttttgtattttgagtagagacggggtttcaccatattggccaggctggtctcaaactcctgacctcgtgatccacacaccttggcctcccaaagtgctgggattacaggcgtgagccactgcacccggccccttatctatagttaataatgcttcaatcaacataggagtgaaaatatctcttcaagatagtgaatttatattctttggatatttacttagatgtgagattgctgaatcacatgatagttttatttttaattatttgatgaacctccatgccatcttccataacggctttaccaatttacattcctggtgatagtgtacaaggtcccttttctctatattcttgataacacttgctttcttttgaatttttgataaatatcaccttaatatgtgtttgaatgctaactcactgtggttttgatttgcattttctcagaattactaatggcttctttaaaaaaaactagttttttggctactttttaaaagtatgtgttacgttttgtcgttatttttattttgggggcttaagttttatgagtttcttgcagattttgaacattaatcctttatctgatatttggcatacaggtatttttctccaattctgtagatagcgttttaatgtctatgatggtcttttgctatgcagtagaaactttttagtttgatgtagtcctacttttttttcttgtgcttttggtgtcaaatacaaaaaaaaactattgctaggatcaatgccaaagaattttgctcagtgttgtcttctagaagatttatggtttcaagtccaatgtttaagtctttaatatattttaaattaattttatgtatgttgtaaaggttgggtgcaatctgtttttgcatatggatatcccattttcccatcaccatttattgaagagtttattctttcaccattatgtgtttatatgcctttgttgaaaatttgttgaccatacacagatggatatattttatacatatctaagctctctattctgttccattggcttatgtgtttgtgtttatgccaatattttgcagttttgatgaccacagctttgctatatagcttgaaattaggcagcatactgcttctagctttgtccctcttgctcaaaattgctttatttgaggttttttgtaattccatacaaaccgtggattttaatttttgttgaaaatgctattgaaattccgatagaaattgctttaaatatatacaccaatttcagtagtatgaatgttttttttttctggttttgtttttttttgagatggagtctcactttaccaccaggctggagtgcagtggcgcaatctcggctcactgcaacctctgcctcctgggctcaagcaattctcatgcctcagtctcccgagtagctggtattacaggcatgtgccaccacacccagctaattcttgtacttttagcagggacagggtttcaccattttggccaggatggtctcgatctcctgacctcatgatccacccgcctcggcctcccaaagtgctgggattacaggcgtgagccaccatgcctggccagcatgaatgttttaatactaatttttctaatccattaacactaagtatttttaatttctcttttctataattgcctccactaatattttacggtttttgttgtacaaatcttttaccttctttattatatttatttctaagtattagattggtgcaaatgtaactgtgatttttgccattaccagcgtaatattttattattttagatgttatagtatatgtaactgtcttcttgatttttcccagatatttgttgttggggtataaaaatgcaattgattttttgtacattgatatagtatcctgcaaacctactgactttgtttactagttctaaaattttttcatgtaatgatgagcacactggcctgtgtttacacattaattgatcatttttattaacatatcacagtgcctaaaagtgtgctctgttgtatttttgctgtgacaaattctatggcatctttcactcctaatctttttttaaatgcttttgtttggtatttgataataatgtgtctatggttacttttcaactgtgcaacacatttatctccatgccgagtcaaactttctaatgaagttaatagttttatgtacatttagttattgtaaatcaaaacagtaaatttttatgatagttttaaagttactaagattgagaatatatcaatttttcactgctcatgaatctgtgggttccttaaacaattatacataaggtctatagatatgtgtctgtgtctgtgtgtgtgtgtgtgtgtgtgtgtgtaatggctcagaatcttgcctaacatattgtatgcactaagcaagtactagtaaaattattcatcaaattatcatcttcataccattcttcaaatggcatattgtttgttctaattaaaaactatgtttctgtcttatgttaagtagcaacaaaaattagaaggtctacttgttctgccctcttgagaaaatccaaagttaaatggtagttttactaatttcctttagattcagtaccttattttcctcacacaaaaatgtaaacattaaggacaacatcatatttaaatgattcatcctacaatagacagacttcgggtcattcattgattgggctgaagtctcactcactctctattatttctaattttttcacgttaacagcctagaaaatctactacacatggaatgttataaattagaaattaacaccttggatgtacaaattataaaagtaaactgaaaagtataatataaaataaatatttatatattatggattgttattctagtaaagcaaaagcattcatttaaaatattttcacaaagaaaagtccagggcaaaataacctatataaaacattctaccaatattcaataaataattaatactaattcttcagcagaaaatacttccaaaaaatgaagaagagggaatattttccaattcattctagaggccagtattactgtaatactaaggccagacacaagtataaacagaaggtgtgtgggcaaatatgccatattcatgtagacacatacagcctcagaaaactttagcacgctaaatccaggcacataaaatatgaatatacaccaagaacaaatgtgattgttttgtaaatgtcattgtgacttagtatctaaaattcaatcaagataatacccaatattagtaaagaacaaaaagtgatcctttaaatagatacagataaagttacaaatatcaagcatcattcctgacaaaacccccagcaaactactaatagaaaagattttgagacccactaagaggtatctataaaaaacctacagctaacatccatcatacttaatggcgacagacttgtgcttctttacctgaaagtttgagagacaagaatttccactttaaccactctattcagcattgtagtattagccaggaaaattctacaacagaaaaaaaattgtccagattgtaaaataaaagtagaactgtcattattgcaaatgaagtaattttctgcaaaaaaaaaaaaaaggattcactaaaatatcactagaataaatacacaattttatcaggggtttttaagaactatacagggtgggactctaggtgcataggttcagtgcataaacatacatctttaggaggctgaggtgggtggattacctaaggtgaggagttcgagaccagcctagccaacatggtgaaacccggtctctactaataaaaaatagaaaaaaaaaattagccaggcgaggtggtacacacctgtaatcccagctacttgggaggctgaggaggagaatcacttgaacctgggagccggaggttgcagtgatctgagatggtgcccctgcacctaagcctgggcaacagagtaagactctgtctaaaaaaaaaaaaaaaaaaaaaaagatctaaaagcaactaggggtcacctgttcaagtttgtgctggttggagatcttatctccttctgatatctggtcggggtggagaagctctggtgctattgggccatctggtttctttatgcagctgtgcctacaaataaagaaactaaagaaacacagtaagaaaaagaactttcccagttatttcatcagggtggccctggtaatatttttattaatttttcatttatttatttatttatttatttattgaaatggtgtcttgctctgtcacccaggctggagtgcagtggctccatctcaactcactgcaacctccacttccccccacgttcaggcgattctcctgcctcagcctcacacctagctaattttttgtatttttagtagagacaaagttttgccgtgttggccaggctgctctcaatctactgacctcaagtgatccttctacctgggcctcccaaagtgctgggattacagtcatgagccactgagcccgacctaatttttcttaaatgtatgtagagcgcacatttatttcagtgtttaatattgtaagtgttttggggctttccaagtttggtgatgtttttgtgaccagaaatatgccatagaaactatttctatcaattaggctatggtaaaattggtttaattacaagtcacagttttcaagaacatattaaatcctcacactaagtaagaacttactgtattcagcaggcaatggagagtcagaaaagcttaagcaaaaatgagcagttcttttaccagaacataggtgataagacataattttatgaaacatcaggtttataacaaatttattacattatgtagatattattagggctgtgaagataaaggccacataggcccatttatttgcaagtcagcacataaacatagaaggatgattaacaatataagcttctagagcttatgctaaatgttggtgggaacagacaatcaattatggagaacttcagaggacactaagcttggatgggatcttggaagttttacaggtgaatgtcattccatctattggctggctttcactagattaataaatgaacaacaaaaataacatacatcagaagttataatcatttcattgagtatctgtcacatctatgccattgtagtgtactaggtgacttatagcacttatgagtcctctacttacaaaatgcttttcacaaaatatgaaactccaggcaaagattcagacatataatgtttgttttaaaatctctttttttttttttttttgagacagagtctcactctgtcacccaggctggagtgcagtggcacgatctcggctcactgcaagctcttcctctcaggttcaagtgattctcctgcctcagcctcctgagtagctggaactacaggtgcgtgccaccacgcccagctaatttttgtacttttagtagagacagggtttcactatgttagccaggatgagtcttgatctcctgacctcgtgatccgcccacctcagcctcccaagatgttgaaattacaggcatgagccactgcacccggcctgtttttaaaatctttatatagcttggtatcctttctcctttccttccttttactcttttatgagttttatcttagactaacctctgtaatgttgctatatgccagtattcagttgctgcgtttgatgaatcataaaatggtgtaaaacttcaattaatgttctttttaaataaaatatttatgaatgcatccagaaaaatgcttatgatttgggtattcacaaagtattcaagaatagaatgtattctgacttggaatgtgcataaaatcagctgagtgcagtggcctatgcctgtaattccagcactttgggaggccaaggtaggtggattgcttgaggtcgggagtttgagaccagcctggccaacatggtgaaactctgtctctaataaaaatacaaaagttagccaggcatagtggagcatgcctgtaatcccagctactctggaggctgagacaggataatcacttgaacccgagaggcagaggttgcagttagccgagattgtgccactgcactccagcctgggtgacagagattccatatcaaaataataataataataataagaagaagaagaagaagcatttcctgtgactcccaagataaaatagcattacagaatactgaataatcctgaatttggttttcttggttttcttttgctttttatttagttttgttcaccttgaccagtgggctggtggttcttaagtgcacctgcgttttcattgctagggtcaagattttcaaactttaatatggtaatttctctaatttttttgacagttatttctcaggttgcaagttaaaataaaatttccattttactaaagtctttggtttattaattattttataatgaattaatatatatttaatgagtaatgaggggtactacaaaatttcagaactcaaaactaaagaacttattcatggaaccaaacaccacctttttccgaaacacctattaaataaaaaatattaaaaaaaaatttttaaaataaaactaaaaataaaatgaaaatgaaaaaatatatatccaggttaaaaaaaaaactatttcagttaaacaacaaatacttttttgggggactctactacaaaattgtttgttattataattaataaggcagacaaaaaatctaagttttttaaaataaaaaacagtaagtaaaaaaaaaagataataacaaatattggtatattggtgaaggccaggctcagtggctgttttccaaagtggttacaccagtcgggtttgatggcacacacctgtaatcccagcacttcaggaggctgaagcaggcagatcacttgagctcaggagtttgacacagacctgggctacatgtgaaaacccaatctctaccaaaaaaatgtaaaaatcagccacacatgatggcattcacctgtaagtcccagctacttgggaggctgaggtgagaggatcacttgtgcctgggagatcacggctgcactggccatgttcacgccactgcactctagcctgggcaacagagcaaggttttgtctcaaaaaaaaaaaaaaagttggtgacaacgtggaagaattggaacccacatacattactggtgggaacataaaatggtgtaatcaatttaggtgtttcttttcttgtcatttgatttttttaaaaatcaagatattgtctccctatgttgcccaggctggtcctgaactcctggcctaatgcaatcctccaaactcagcctctcaaatacctgagactacaggtgtgagccactgtgcctgactggtgtaaccactttgaaaaacaacatggccgttattcaaaggctgaatgtaaacttaccacataatgcaacaatttcactcctgggtgtaaatccaagagaaataaaaatatatgttcacactaaaacttgcatatgattgttcatagcagcattactcatgatggccaatatgcagaaacaacacaaatgtccatcaactgatgaatggataaacataagctattattcagctacaaaaagaaaaaaatactgatatacactataacatgaaagaaatttgaaaacattgtgctaagagaaaaaaaagcaaactacaaaagatcacatattgtacaattctatttccataaaaggtccatattaggcaaaactacattgacagaaaataaatcagtggtcgtctatgaagacacaggaatatggaggaagtaggaggtagcagttaataagtgagggtttctcactcataagtgggtaactcataagtgagtaatcacttctaaaagtgactgtggtgatggatacacagctctttgaatattctaaaaaccactgaattgtatactttctttttttctttagttatttagagacaaggtctccttctgtcacccaggttgtagtgcagtggcgccatctggtctcactgcaacctatgccttctgggctcaagtgatcttccagcctcatgtccccaagtagttgagactacaggcatgagccaccacacccagctaatttttgtatttttaagagagatgctgttttgccttgctgcccaggctagtctcaaactcctgaactcaagtgatccacctccctcagcctcccaaagtctcagcatgataggaattagccactgagcccagcctgaattgcatactttcacaaatgaattgtatgatatgttaatcatatttcaataaaatcattaaaggggccgggtgctgtggctcatgcctgtaattccagcactttgggaggctgaggcgggcagatcacctgaggtcaggagttcgagaccagcctggccaacatggcaaaaccctgtctctattaaaatacaaaaaattagccaggcatggtggcatgcacttgtaatcccagctattcatgacgctatgacaggggaattgcttgaaccagggaggtggagtttgcagtgagccaagatcatgccactacactccagcctgggtgacagagcaagactctgtctccaaaagaaaaaaaaaaaagaaagaaaataggggttgaacacaggtggctcccacctgcgtataatcccagcactttgggaagctgaggcagaaaaaacacttgaggccaggagtttgacaccatcctgggcaacatagtaagatcccatctgtacaataaaaaacaaagaagtcagctgggcataggggcaaatgtctgtagtcccagctacttgggaggctgaggtgggaggattgtttgagcccaggggtttccagctgcagtgagccatgatcgcaccactgcactgcagcctgggtgacacagcaagaccctgtctctaggaagaaaaaagaaaaagaaatgcaagtttttatcaccttctgagagtaatggactttcaggaggaatagagtaaaacaaaagaccactgaatggttgagggtggtttgctggttaggctcagttcccagctgagtagtatctgaaaaattagtaaaattatggttctggcatgagtcatgcagtcaaatgatgaatgctaaatccattgcaaatgcccatggtctttctttacatgaattccagtgaaaaattcctaagttcctaaatagcaagtgagtacctagaactataggcacatgtcaccgtacctggctaatttttacaaaaactttctgtagagatgggttttcaccatgttgcccaggctggtcttaaactcctgaacttaagcgattctcccgcctcagtctcccaaagtgctgagattacagacataagccactgtgcccagcatgtacatctctttcactcgctgtttctgagatacatcctttacaatgaaccagtaataataaattggtgagacacagtggctcacgtccataatcccagcacgttgtggaagttgaggtgggaggatcatgtgaggtcagaaatttgagaccagcctgggcaacataacaagaccccatctctacaaaaaataaaagaacatagccagctatggtggtgcagtcctatattagtctcagctatttgggaggctgaggtgggaggatcacttagggccaggagtttgaggctacagtgagctttgatcacaccactgcattccagcttggcaacagagtgagaccctgaatctcaggaaaaaaaaggaaaataacctgttttctgagttctacaaggtgtttaagcaaatgattcaacccaagaagggggccatgagaccctggttctaactgattggtcaaaagaacatgtaacaactcagggcttgcaattggcgtttgaagtgagggtagtcttgtgggactgagccctgacctgtgcggtctgcactaactccagggagtgtcagaacggaatcatgggataccgggttggtatccagattgtctgaaaactggtgtagaaactctgcacgcacatttggttggaagtgtttgaccgtaactactattcaagaagaaaaaaaaactactcattagaacttaaaaacataaaattgtatgttctacaaaaacaaatcaaccatatttacaaccaagtcctactgaactactgaatgttagaactgaaggcctcaccgtggactcaagagctgacatgaggaacgtcaccaccatcctgctctcgtaggagtcctcatcttcaatggacagggtagacactaaaacttgggccatgatccctgcacaagagaagtagtaagaaagtgagtggtgggcagggtgtggtggctcacacctgtaatcctatcagtttgggagggtgaggtgggtggatcacaaggtcaggagtttgagaccagcctggccaatatggtgaaaccccgtctctactgaaaatacaaaaaaaattagccgggcgtagcggtgcacacctggagtcccagctactcagaaggctggggcagaagaatcacttgaacccaggaggcagaggttgcagtgagtggagatcgcaccactgcactccagcctgggcaacagaatgagactccatctcaaaaacaaacaaacaaaacacacacacacacacacaaaaagaaaagaaagtaagtggtaaaaatccagtgccctaaacccatatccagagctgtgagagtttttcactggctaatttacagttttcttgcatcagagaaaaaataaggctcagaaactaggtattcgatttgcccaaaactctcatcagatagaaaatccattccctaactttctagctagtattatttccataaagttagatcagtatcactccgaaaataaatacacgtcacccagtatatttctcccaaataaaagaggaagcaaggcgctttacaacccagtgatgggctaccacatcaacacaggaaagaggtgccaagctcctttactcccgtccataaccctacacagaaaagagtgggtgcagtggaatgaggctgggtggagagaagttcctcttcttactgacaaaatagatcacagggcatcacgtaatatgtaaaagtctttataatacagcatattattttctttggaaaaccttttctaatattttggtatcagtaaaaaccctcagatgaatttcaaacactataaaaatacaatacataaacagaaaatattaactgtcagtaagcatatagagaaattggaaactttatgcattgctgtttggaatgtcagccccctgtgggaaatggtttggcatttcctcaaaatactaagcgtagacttatcatatgatccaacaacaccctttaagggtatatgcccaaaaaactgacagcagagactcaaacaggtatttgtacacctgtttaatagcagcattattcacagtggccaaaaggtaaaaccaacccaaatgcccatcagtaggtgaatgaataaagaaaatgtaatatatacatacacagaatattattcagccataaaaagaaaaaaaatctggccaggtttggtggcttacacttgtaatcccagtgctttgggaggctaatgtgggcaggtcacttgagcccagaattttgagaccaggctggacaacatggcaagacctcatctctacaaatatatatatatatatatatatatatatatatatatatatatatatatatatatatattttttttttttaaaggaaattctcttagtgttataaatgagccttgataacattatgctaagtgaaataaaccagacacaaaaggaaaaatattgtacaagtccacttatataaggtatctaaaattggccaggcgtgatggttcacacctgtaatcccagcactttgggaggccaaggcagggagatcatgaggtaaggagatcaagaccatcctggctaacacagtgaaaccccgtctccactaaaaaatacaaaaaattagccgggcgtggtggcaggcacctgtagtcccagctactcgggaggctgagacaggagaatggcgagaatccaggaggcggagcttgcagtgagccgagatcgcgccattgcactacagcctgggtgacagagcaagactccatctcaaaaaaaaaaaaaagaataatgtaatctataaaatagaataagcatacaacaggccgggtgcagtggctcacacttgtaatcccaacactttgggaggccgaggtaggcagatcatgaggtcaggagatcgagaccatcctggccaacatggtgaaaccccatctctactaaaaatacaaaaattatctgagtgtggtggcgtgtgcctgtaatccaagcttctcaggagactgaggcagaagaatcgcttgaaccaaggagtggtaaattgcagtgagctgagatcatgccattgttctccagcgtggtgacagagtgagactccgtctcaaaataaataaatacaaaaaatacagtaaaatatgaaatctctttttctcctatccttctgctggtacttcaatttctgctggtactgttccatcattgccctctaaataataatggcttcataaaatgaaaataaacaacatacaataaaccagtaaaaattcacattgaaagagaaaagagaagctaggtaacaatgcaaacacttttaagacataataaacatataaaaaatgatccttttaactcaatccaaacaatgtttctaattcagaaaaaaatataacacatatttggaagctggaaaacattattttaaaatatgaatacacagtagactcaagtaggtttagggatttaatattagtgtatctatgtgataaaattactggatattggaatctgaagaagtacaattatggttcaagtaccatgctcatctgtcactgacacacacacacaaacaaattagcatgaatgcttgctttgctcagacaattaactctctataagttcagggtttgctgtggaatgctccctgttttccattttcactatggtgaaagctatggaaactcaatccatgtaatttaatccaagctgtacataaagtaacttataagtaaaaactgaagatactacctttagtgtcaaaaatattttaatcccggtaatataatctgcctgcttctaaaaactgggatataaagcaatagattaatcaggcagtcacaagggaaacaagctcatcctactggagcagaagttttattcacaaataggaaagaaagaatctaagatatcagagggccggtaaggattaagaccacaagctgcccccacaggaacaagatatattattttgttttaagccatgaaagtttaacagggcagtttgtaatgaagaaacaaataataacaaacgatctatcaagctagagaaagaccccatgctcatttcattttgtcttacttcactagtattgcaaagggaaagtgagaaagaaaaagacagagaaggagagaaagagaaaatcgagagaaaaagagagactctccaaacaaaatgattatgtctcaaaagaaaaaaaaatttttcatctatttgtctaacacacacacacacacacacacacacacacacagagagacacacacaactctactgcttggtatcccaccctattttgtatccctgaggatttatttgagtccttgagaaagccccttatgaacattagagctcctcttagggttagcggggaacgggtataactgagctttccctacagactagagtaaatgtgctaagccagaatgtcttcttcctcctcctcctcttcgtctttctcctctcctcctcctcttctaaatttaaatagtctatatatgatttttattacttatgtaattgagttcctaaatgtgccccaggcttagtttcttcacactcttaaaaacctatacttttagaaatccttaggttctggagtcccctagtctaggttggatatcttcgtgtgctatttgctatttttatggcatttgtcatttactagctgaattagttcatttcctcactgctatgaagaaaaaccaaaaactggtaatttataaggaaaatagatttaattgactcgtaattccatcagctgttaaggaagcatgatgctgacatctgctcagcttttggggaggcctcaggaaatttacaatcatggcagaaggcgaagggggaacagcccttcacctggctgcaggaagagcaagagagagagatgggaaaggtgccacaaacttttaaacaaccaaatgtcatgaaaactcaatcacaagacagcaccaaaggagtggtgctatagcattcacgagaactccgcctccataatttaatcacctcccaccaggccccacttccagcactggggattacaattcaacatgagatttgatggagttaaagatccaaaccatatcattaaccttttctatgaatcaggttttaaaaaaaatctgttaataatggcacctataatttgctgtgaggatttgataaattaaaattatttgtcaataacaacaatgtccatgaaaaacttgatttaaagttaaataagaaaatccttctaaagcttccagtaagcatcagttaataattggtagtttctgtttctcttattgcttttgttaaaaacaattatcttctacatgtgagtaatggtaaaatgggacaacaatgtgatttgtttcaaacaatttatttttatgctggtatttcctacttcagaataaatgaaaatatagattattgaatctgacaataaatcatattctttataaatgaaagcagaatggaagattaatttggattcagatattaagaagactgaataactgatatgaaatattcctacacactagttttaaaattatgttctacaaggcaactttgagggttttttgaaatgacatgtttatggtagacaaacatatcatatgctcttacgaatattcaatatgtcagcaaaagatccaactctaaattttcttgttacagtcagcttcctaagaccgctctatgcataactgtgttacacaggtttcctggaacagaccttgaagtggaggactgcaggcagaatctttgttgtggagtgatcttgagatacacacctgtaaagaagtgagaaatgcaggattagacagagggggaagctgccaaacaataaggtgacaatggaggattctgctgattctataaacagctctggacttaaaatgagccttcacattgctccaaattgagttgtaagagttcaactttgatatccccaccataggacaacaatggacctcaggatgcattcacacaatgggcatactcttgactatgcagtttcctgtggttgagagcaattcctaattgagtgatgaagctgtaaatggttttcttcataaactgggaaatggttttcttggaggccccgaagaggaaaactgacagagtatcacaataacagctacaatatcccagatttaaaacaatttaaaaatatttattagggtgattcatttctttatttctttcaaaacatgtttacgaaaacatgttttgaaaacattaaatatctttgatatagtttagtaggaaaatactcaaaatcaaaattgtaaaaacaatgtgtttcttatacaattaaactgcatttgaagtagatggtaatgtaatacaaatcttgaaaagtttttcttttctaaaacaaggtgccaatgatgtactacactgtaattaacactgaaattctgggaactacttcatcatttccagtcactatagttgcaaagctgggaagtaaacactgtacatcagatgattgctttcccatggaatacaacaggctgaagttcccttcattatacaaattaataaaattcaaactatataaaatatatattagtcatcgatgattaattcacccatatctgggtaccaaaggtctggactacttaaaccatgtagattcaaaattctagattgggaaaaattataaggaaaacccgaagctttcatacagtgtgaaaattattcagcacatatggataatttttgatgtttgaaataagcagaaagatctctaatggagatgactttatgactttgtttaggaacagcataaaaataaacattttaaagtgctgttatataaaaataaaacaacagttatttctctatgttttgaaagctaaaactaaataaatgatagtaggagcagaggtgctttgttacaagttcttttcaagcacttacaattaatacctttaatggcggaaggaaaaaatactgcttcaacaatataaagatatagcagttcacagtggcaaccaggcaagatgttactttgaaatgccctgctttaacagtatacctggggactttgcattctcctctaaactgggtttaatataaagcaaatcccaccacagctgtcttcaagctttctagtaaaatggccctccagaaagatgatctttggtgttaacccctgtcaaaatgacagctcgccaaatggagaagtcaaatcccagaaaaaaacaatagaaagtttcgtagaagttagtgagaaaaataaaattttgagtgttaaatgattctcacatattgaataccattttacttattttctctaacaaatccattcaccagtatcattataatttatgacttttattgtggtacaatgctgtcctttcataaatgtacttcagtgaagtaggattactcctgtatattattactatggatgctacagtcatgctttctttgtgcacaagttgccatgagctaaagcctcattaaaaaaggtagatctgtttctaggtatgtctactcctatattttatcaagtacgtatgcatgtatgtatcacaatatctaaatatgagcaagcttatgagacagtgatattgataacaatatcttcagtagaattaagatttatcttctttgagatcagaaaataaaaccatgttagatttagcttagaacatgcgtacctaaaaaagattgcttaaattagcttataagtgagaactgtgataagtatgttaagcaaacagcttactggaagttatttcttccattctgtatactcttaactaccacatatcataaagtcctaagaatctagtttgggaaagtataatagaagactgaagcaattatttagatcatttaatctaaaaaaatcccatcattgtgccaattctttggtatttcaaggatagtaagatcaatgttttccacgattattgttagtattattttatcattaattttcattaatttatgatttatttaatactttcttgacaatatcggtatatcttaaaatcctgctaaattttacacgtgtaaattctggatattactaagctgacctaaactacatatctccgaaaagaaaaactaaggtgacaatacagttaaaaccaaattttagtttcagattctaaggaaataatgtataaatttgaaaaatagctatgttcttatataattataaaataaaaatgttatttctatctaaattaaatagacaatgtattaatctagattaatgaacatgctccaaatattttgaaccaaattactatttcccatctattacaacatacgattcccatctattacaacatacgatttttactactttgtacataagtgtattattgagatgtaactattatgtctccttatattttctttgtaacatttaaaacattctcattattttaaaaaaatccatatgctaatacttaggaaaaggcttttttgtgcctgagatttctgtaactgtgaaaagcataagggagaatttcttttccaaaaacatagacgttaatgaagttgttttttgaggcctgttcttcgtaactgttttctaggtgatggactattatcaacttgctccataatccgtttagagttaaagaggaccacagaaactgcacctccaggtgtcacaggttactaaactaataactaaaacaaattaaaagacttatctcagattccctcctggagtctactgccttgtttatacagctggaggacaaagtcagccactgcctgaattcatattctgcactatgcgattcaggaaatagtgagtccaagcatttcttactcttaaaattgtgttcaatgtttgcagtcactttcctatccctgatattatcaggaagggggctgcaatttcctttctgcttctctgagtcaactgcaaagtctcagatgttttcacagttgagacaagagaacaagaagcaccaatgaaaaccacggggttctatggaggcatcatggtgtagtgagcagaagcatgctactctagctgtatctcactgggttcaaatcctgactatacggcatatggtgcattaacagcccgctgaccacaagaatttctatgctggtaaaataggtttataataatgccagttaatctaaagatgctttaagtgaagactatttggtgtttttcaaggactcaataatcattaactgtgatcatgatcttccccttacctactttcaataagtaaataatttacatttattaaacaaaagaaatttaatcttgcttttctgaaacaacacaattctatttcaattttctttacatagagggagcatctcaccgcagataaagatgtatgtatattttttctccacttgaaattatgctgagactcaaaaacagaaatatctagtacgatatcaattcatatatcagttatgtttagagggagttgggctaaacatacagcattcatttaaaatgaaggcctcccgtcacactttgctgatggtatttaagtattgaaagccaactttttctacctgcttactattatgtcatagtagcatgatttcccagacagcagaaactttgtctttttgtacatagctaggcatttgatgcttgtaacagtgacttctcgataattattcattgccaggaaagataattactttaaaaatttatttaggacattatttagcaaatagtaaataaacagtattagctggttgctattatttctgaatatcagtttccctaaattttctcatctgaaaaatggagatatttcacagcagcattgtgagagacaatagagtcaatatagataaaattctccaaagaccaaaactttatctagctcatatgttctgcatgagtattcatttttttaattactgtatctttttaactcattatgactaaaattaagtatttttttctctttcaagaccttatgcttctcctatgttcccaatatgctggaaatcaggtgtgggtaataatagcaccatgattttcctttggagaaatcagtccaaatgactttattccacctataactccatagatgccatgaaatccagacctcagtacagacagtgacttccatgaacttagctaaaatttttggacaaagtttactctctctggattctaaacggatagggtaatgttgctgtctcatgaagcaccttctgagcctactgaagcaggagctgatgttgaggcagaactgaaagatgcagaggcagagtccggataacactgtctgaacacctgaaaacacgttgaacactgacgaattttaattttctattttagcccaaggtcagtaagcatcttctgtaaagggctagattgcaaatattttaggttttatggaacataaggtttgggtgcaactattaagctccagtgatggatatggctgtgttgcagttaaacttgatttacaaaaacagatggcaagaccaatttagccgtggatcatagtttattgactcccgccttttcctgacaaagtagagtttctttacctggcaaccaaagcagttagtcttaactaataccccctgtatcaggcactggattaacacatttttaagccaaaaatttgaaaaataatcatttataccttttctctgttcccttgcagcataaatacaacatcagaaagtatgtttctctcaaatgtttccttggtctatttactctttccattcccacctacaacctgttatttcaaatcacaatcatttcctgcttaacattctataaaaactttttacatatttgctggagtctaggattcctttcaattctttttcacacggaaggtcttattgtgacatcctgccttgttttaacctgaattgactctcccttagctgagagagccacacaaactccagtttggctccttcacttgcagccccttgcagcctcttacccacccccctttctcaaggacttaacttgtgcaggctgactcccagcacatcaaagaacacgattaactgataagacactgtggcaagctatatccgcagttcccaggaattcacccggttgataggacccaaagcccccggggtttgtgtcccgttgatagcacccaaagcccccaggtctatcaccttgtgatggatttaaagcccccgcacctggaactgtttgttttcccgtaaccatttgtccttttaacttttttgccttttttactcagctgattgcttcagctaagctccccctcccctttctaaaccaaagtataaaagaaaatctagccccttctctggggccaagagaattttgagcactaagggtctctcggttgccggctaataaaggactcctgaattcgtctcatagtgtggcatttaactacaactcgctcggttacaacattatgatatttccacaatacatacattggcatgccgtggtcatatccaggggactgtttatgaacctttgacatggataatgtctcctgtcataaagtgcatattatctgacttgtttattaaattgtatcttttgtttctagaatataaattatgtgaggatcagagcaattttttttttttgtttacagctttcttcaattgtctatacatgtggttgatataatgtgaataacccatatatatttctaaaaagaaggccaaatgactcagcagggaaagtaaatataaaaataatgcatttttttctgaatcaatacagacttaaaccatataataaacttctgcatttagacaaccattaaggtctatagcacatatttactattctatggtaatctcttagatttatcttgcgccaacatactaaaattttaacggaataaaaacagaaaagaggttttcaaaaaatattattttcatatacctaattttccaattgtctttctattcctgttggctcttaaaatttacttattattcaatgtccagttcaagtacagattctcattgtctttctaatttatttcctgcagggctagtttgttattttagacacagtttctgtatcacacatttttatagttcatattgtatgtaaattaaattgttgcagattcttcctatgtgcacgtctttgatgcacacgtacaatgaatgttcccaaaaagtattaataaagaacacattttaacttctttttaaatcaccaatttcagtacaaagcagtgtgcacagaagatattcactaaattcttactaaatgagtgaatttcataggaaattggaaaatggatgatcataaaattacatctggaaggaaatcatgcccagaaaatttatctgatgactgcacacacaatttttgctaacattatgctgaaggaaacaagtgtatgacagtaacatgaaacacaacaatggttggtttacacttcacatcattcacttggtattctggtgtggagaaataatatttgatcaaaacttaatagcatttaaaattgtttatttgatctttattctaactagtgatatggatcacacaaaaggtgtttaggctctttcttctatggcatgagaatatttttaaaaatatatttagctactcaaaaagtacaatgatataaacagaatatggaaaactcaggagaaaaaacaggaattataattagtgacataatataaaccaaaaatgaagtgccaatctcaaatcattttttaaaatgtgtggtctgaaatattcaaaactgactctagaagaaatcaatactaaaatatttgtcatacaaataattaatgagaaggttatcaaagaacttcatcaaagaattcctctaataaagtccctgggcccagaattcatagttcagaaaggaaaagaaagaatgcataatttccttagtatataaattgattcaaaacaaaaacacaaaaaaactagaaattactcatacaaagctagtataaactcaaaaataagtgtacctgagtatgcttatgcacacatatgagggcatatgtgtgcatgtgtgtgtgcacacctcacatgtgtatgcactacacacacaaggtgaattctatttaaaaacataaatgcagtatgtctagtaacagaaaatagcagaaattaaatcaacaagtaattatctcagggatgtaggattttcactattatatacatatcatagatgtatgtgatctgtgatcatttgactgggggcacaaaaacaaatgcttaaatatttcagcataatacagcatttacatctgtgtggtataaataatattgaataatatcattgatttgaaagaccaaatttggctgggcgcagtggctcacaactgtaatcccagcactttgggaggccgagatgggtggatcacgaggtcaggagttacctggctaacaccgtgaaaccccatctctactaaaaatacaaaaaattagccaggcatgtggcgggcacctgtagtcccagctgctcaggaggctgaggcaagagaatggcgtgaacccggggggtggagcttgcactgagccgagatcgcgccactgcaccctagcctgggtgacagagcgagactccatctcaaaaaaaaaaaaaaaatgaagaaaatccaaatttaacaaaatctgacctatagtacatatatttagtcttcctctttcattatttaattttgctattccatcattattgtctggtttgaattaacataattatcacgtttagataaatatcgtattttataagtataggcagggatccttaaattggtaaaacattttactctttttaaatgtttctttgtaattcccacttccacccatctagtcttccatataaactttagaaagaaattattaggtttcaaaaagtatcctagatggaacagactgatattactgtgaattaatagtaaaggccaggcatggaggctcatgcctatgatcccagcaatttgggaggctgaggcaggtggatcacttgaggtcagaagtttgaaacaatcctggccaaatggtggaacactgtctctactaaaaatacaaaaattagctgggtgtggtggcacgtgcctgtagtcttagctgctcgggaggatgaggcaggagaatcgcttgaacccgggaggcggaggttgcagtgagctgagatggtgccactgcaggctagcctggcgataacagcaagaccctgtctcaaaaaaaaaaaaaaaaaaaaaaaagagagactggaaaaaattgaggtctttaaatattgacttatgccaagcattaaaagcaattctctaatttttttcttttacatagttcagtaaattttaatagattatattccatattccaatgtatttattgctaatttattcctaggcaatctgcatgtagacataaatttcctctgtaaaatgaatttcttatataattttcatttttcttttgataatgtaaaagaaagatgttatttgttttatgctgaccttacaattaaccatgttctatacaatcttattagttcttttttttttttttttttttttttttttttgagacagagcctggctctgtcgccccggctagagtgcagtggcgcgatctcggctcactgcaacctctgcctcccaggtccaagcagttctctgcctcagcatccagagtagctgggattacaagcacccaccatcatgcctggctaatttttgtatttttagtaaagacgaggtttcaccatcttggccaggctagtcttgaactcatgacctcatgacccaccagccttggcctcccaaagtgctgggattacaggtttgagccaccatgcctggcctagttatttttatcttaaccatatcattatgacttctgcaatacataagaatctagattctgcttgatattcactctttcatgtattttccagttttattcctcttattttattgaaaatcatctcaaattttgcatttaaaattaattataacaggcatcctagtttccaaaataaaagatatctttctaacgttttgctttaaacataatatacaatatatttctcatagatgtgctctatccaaacaagaactttcaatcttacggtttgtaagaattattattaaaatttggagtaaatatttattttttagtgtatttttctaaaactgtagagataactgtataatcctccttccttaatcttttaatatgacatgtttacataagttttttaaagctgtattatccttgagttcctgatgtaagtgttttttaatagagtaaaagccttacttaatttaaaattttcattttggcataattgccgacttacagaaaagttgacttaataataccaataattaccatgtatcaaaagtccccaactgtaacattgtactataattgtttatcattgtctttttccttaaaagacgcagacattgtgttccttcaaggcattctcttagttgtacttgaatcaaagaaaaaattcacagggaagttggaaaacctttcatactgaaaaataatgatactactatatatcacaatttgtgggatgcaaacatagcagtattaaaaaatatttatagtcttgtgtattgatcctaaaaaagataatgcaaaatcaattttctaaacatccacgataagctacaaaaacagattacattaaaactaaaggaggaagaacggcaacagcaaatataaaagtagaaattaaggacagagaaaaatacaaggaaaaatttgttctgcgaaagactgatctatttgtttgacatatggtaagtctaataacaaaacatacacacacacactccaatataaggaatttttaaaacattagttacagaatgtacagaggtttatggtttatttcccagatagcttgtgtttttctaagtatctgatttttatttatttctaacttaatatgcttgtgatcagagaatgtactttctatgatataaaaagttcaaatatattgagacaacgtataactcatcatatattctatcttgttaaatgtgtggtaatatttaccaatggaaaaaaatatatatatatagttaattggtcataaatgtcaaatatttatttctgttttattttttaacttttcttttttcatactgatattcatttgatcaagtggtgatggaaaggtgttaaattgtctttattttaatagtttttaggggaagaggtggtttttggttacatgataagttatttagcaatggtttctgagattttgatgcacccatcacccaagcagtgtacactgtacagaatgtgtggtctccttcaccctcctaccacccttcctttcaagtccccaaagtccattatatcattcttaggattttgtgtcctcaaagcttagctcccatttataactaagaacatgcaatgtttgattttccactcccgagttacttcacttagaataataacctccaagtccattcaggttgctgcaaatgccattatttcacatttttttcttttcttttcttttcttttcttttttggagccaaagtttcactcttgttgcccaggctggagcacaatggcacgatcttggctcactgcaacctctgcctcccaggttcaagcaattctcctgcctcagcctcccaagtagctggtattacacgtgtcttccaccacacccagctaatttttgtatatttagtaaagatggggtttcaccatgttgaccgggctggtcttgaactcctgaccttagatgatctgcctgcttcggtctcccaaagtgctggcattacaggcataagctaccgtgcctggcctattattttatttctttttatggctgggtagtattccgtgccacattttatctattcattggttgatgggtatttagactggttccatatttttacaattgcaaactgtgctgctataaacatgcatgtgcatgtcttcttcatataatgaaatattttcctctaggtagatacccagtagtgggattgctgaatcaaatggaggttctacttttagttgtctaagcaatctccatactgttttccacagtggttatactagtttacattcccaccattaatgcaaaagtgttcccttttcaccacatccatgtcagtatctattatattttgaaagtatggccattcttgcaagaataaggtgatatctcagtgtgtttttactttgcatttccctgataattagtgatgctgagcatttttttcatatatttgttggccatttgtatatcttcttttaagaattttctattcatgtccttagcccactttttgatggactttttttttgtcttgctgatttgtttgagttccttgtggattctggatatgagtttttgtctgatgtatagattgcaaaggttttctcctactctatgtgttgtctgtttgctgattatttccttttgctgtgtagaagctttttagtctaattatgttcaatctatttatctttgtttttgttgtgtttgattttggtttcttggtcatgaagaaccaagccgatgtttttaatgttttttccaatcttatcttgtagaatttttatggtttatgatattaaagtctttgatccatcttgagttgatttttgcataagatgagagatgagaattcagtttcattcttcttcatgtggctttccaaatattccattcccatttgttgaatagggtgtcttttccaaactttatgtttttatttgctttgatgaagatcagttggctgctaagtgtttggtttcatttctgggttctctattctgtttcattggtctatgtacctttttttataccagtaccatgttgtttcagtaaggatagccttgtaatatagtttgaagttgggtaatgtgatacatccaaatttattatttttgtttggtcttgctttggctaggcaggctcttgttttggttctatatgaattttaggattgttttttctagttttgtgaagaatgatgatggtattttgatgagaattgcattgaatctgtatattgctttgcagagtatggtcattttcacaatactgattctacccagccattagcatgagatgtgttatctatttgtttctgtggtcaatggtatctttcagcagtgttttgccgttttccttgaagagatctttcacctccttggctttggatgctcctaagagatacatatgtatataatatgtatatatgtattatacatatacatacttacatatgtataatacatatacatacgtacgtatgtataacacatatacatatgtatatgtattacatatgtatattatatacatatcatatacatatgtatatgtatacatatgtatattatatgtatatgatatgtattacatatgtatattatatacatatcatatacatatgtatatgtattacatatgtatattatatacatatcatatacatatgtatatgtattacatatgtatattatatacatatcatatacatatgtatatgtattacatatgtatattatatacatatcatatacatatgtatatgtattacatatgtatattatatacatatcatatacatatgtatatgcattacatatgtatattatatacatattataatacatatgtatatgcattataatatgtatattatatacatatacatatgtattataatatgtatgttataatacatatacatatgtattataatatgtatattataatacatatacatgtatatatgtataatacatatacatgtatatatgtattatacatatacatgtatatatgtataatacatatacatgtatatatgtataatacatatacatgtatatatgtataatacatatacatgtatatatgtataatacatatacatgtatatatgtataatacatatacatgtatatatgtataatacatatacatgtatatgcataatacatatacatatccatatatgtatattatatgcatagacatacccatatatgtatattatatgcatagacatatgtatataatatgtatattatatgcatagacatatgtatataatatgtatattatatgcatagacatatgtatatgtattttatatgcatagacatatgtatatattatatgcatagacatatgtatatacatatatttatgtgtgtgtttatatacatatatatgtatattgcagttgttgtaaaagggattaagttcttgatttgattctcagcttgattgttgttggtgtatagcagtgctaatgatttgtgtatattgatgttttgtgtcctgaaacttaagtgaatttatcagatctaggagctctttagatgagtctttagagttatctagatacacaattatatcattggaaatcagtgacagtttgacctcctctttactgacttggatgccctttctttctttcatctgattgctctggctaggacttccagaactaaggttaatagatgtggtgagtgggcatcatattcccgggggaatgctcttcaacttttccctgttcagtctgatgttggctgtgggtttgttatagatggcttgtatcatatgccccttctatgccaattttgctgaagattttaaccataaagggattctgaattttgccaaatgctttttctgtgtctattgagatgatcatataatttttgtttttaattatgtttacatgatgtatcacatttatgacttgtatatgttaacccttccctgcatacctggtataaaccccacttgaaatctttagattatgaatttggctgttcatttttagctatgtaaaattttactttatataatttgaagttatattattaagagcatatgcatttcaaattgttttgtcttttaaatgaatcagttattttatcattataaaatgtttctctttcacttttgtactgtttttcctgtgaagtctactttggctggtattcacattagaattcatatgtttttataacactggaacttattccagacacatggcataataaggactaggtttgtactcttgccttaaataaactaagaaaattttgataaaatatacatatcaatggtcttcagacagcgaacatcagatagtataggacagtgaccttgagacagggaaaatgaaggtatgaactaaatcatccatccatcttattgcctttattgaacacagaataatttttctgagattggatcaatagaagtataatcgcaaatacaagcaaatggatatagcacattaaagaggtattaaattttttatgcacaagaaacagtatcaaaatgagttaaatttacattcaagtctttaattcatcctgagtcttttttttgtatatgatgtaaagaaggggtcagtttcaattttctatatggctagcctcttatcccagcatcaattacttaatagggagtcctttccccattgcttgattttgtctggtttgtcaaagatcagacgtttgtagatgtatggtcttatttccgagttctctgttctgttccactggtttatgtgtctgttcttgtacaaataccatgctgtttggcttactgtagtcctgtagtatagtttgaagttgggtagtgtgatacctccagctttgctctttttgcttaggattgccttggctatttgggctcttttatggttccatatgaattttaaaactgatttttctagttctgcaaagaatgtcagtagtagtataacgggaatagcattgagtctatacattgttttgggcagtacggccattttaacaatattgattcttcttatccaggaacagggaatgcttttcatatttgtttgtgtcatctctgatttccttgggcagtggtttgttgactgtaaaaacatcggaagaccacctaggctataccattcagaacataggcacaggcaaagatttcatggtgaagacaccaaaagcaattgcgacaaaagcaaaaattgacaaatgggatctaatcaaattaaagagcttctgcacagcaaaaagaaaaaaataaactaacatgagaactaacagacacctacagaatgggataaaattttggaaaaatatgcatctgacaaaagtctaacatccagcatctacaaggaacttaaccaaatttacaagaaaaaaacaaggccattaaaaagcaggcaaaggacgtgaacagacacttctcaaaagatgacatacatgtggtcaacaagtatattaaaaaagttcaacatcgctgatcattagagaaatgcaaatcaaaaccacaataagataccaactcatgccagtaagaaggaccattactaaaaagttaaaaagcagatgctggtgagattgtggggaaaagggaacactttacatggttggtgggagtgtaaattagttcaaccattgtggaagacagtgtggtaattcctcaaagacctaaggacagaattaccattcgacacagcaatccctttaatgtgtatatgcctaaaggattataaattgttccattgcaaaaagacatgcatgcatatgttccttgcagcactattcacaagaacaaatacatggaattaatccaaatgcccatcaatgatagactggataaagaaaatgtggtacatatacaccatggaataccatgcagccacaaaaaaaatgagataatgtcctttgcagggacatggatgcagttggaggtcattattctaagcaaactaaagcaggaacagaaaaccaaatactgcatgttctcacttttaagtggaagctaaatgatgagaacatggacacatagagaggaacaacacacactggggcctatcagagagtggagggttgggggagggagagaagctggaaacataactaacagatactaggcttaatacctgcgtgatgcaataatctgtacaatcagcccccataatgcacgtttacttatgtaacaaacctgcgtaccttacacatgtaccccagtcaaaaaatagaagtttaaaaaagaacaaaatgagttaaattattggaaaattatttcaaatcaaattacacatagcaacgtgttaagatctactcactgtaaagagctcttttactcatctgacaagcatttagtgtaagtgttctattcgctaggccataggaactagaggctggaaaaacaatggtgaagaaaatgcccatgccactaagaaatttgtgtgtgtgtatatatatatatatatatatatatatgtatgtatttattagaacaaattaagacattattgaacaatggtgcaaacagcaattaacaataacaaaaggctaagatacaaaattattaaaataataataacccaacaatttttaaattgggagtcaacataaaaagatattgaagagatccaaatgtcaaaatgtgtgtgtgtgttgggggggatagagttacagggtaataaatgtttatagctctttgtttctctcctttttgttctttgcaatcaaacttaagttttcctcagtttaaaaccactggttacaatgatattctttagcctcatggtaactagaaaacaaaattcagtaacagacaccctaaaaataatagacacctaaaaagcaaagaattaaatcacactcccagagaaaattacctcactataaatacagacaggaagaaagggaaggagggaggaaaggaaaggaagaaagaaggaaggagagagagaacagaaagaggaagaaatgaggagagaaataaaagaaaaaagagagtagcaaaacgaccagaaaacaagtaaaagtggcagtagtatgtttttacttgttagtaataaccttgaatataaatgaattaaattctccaattaagacagagtggctgaatggatttaaagacaagatccaactatatactgcctacaagaaactcagttcacctataaagacatacatagactgaaaatgaagggatggtaaaagatatcccatacaaatggaaacaaaaaagcaagagtagctatacttatattagataaaatacaaagataattatataatgagaaagaaatcaatacagcagtatcacaattataagtgcaaatgcaaccaacactgaagcacctaaacacagaagcaaatattaacagaccttaaagaacagatggactgcaatacaataatagagtacctcaacactcaactataatcaacaccccactatcatcaatgaacagatcacccaaacgacaaaaaatcgtcagttaaactgtaatctctactgaatggacctaacatttacacagctttccactctgcaactgcacaatgcacattctactgagtagcacatggattattctccaggacagactatgtgttaggccaaataacaagtcacagcccatttttaaacactgaattcatatcaagcatcttttctgatcacagtggaatagtatgagaaatcagtaacaggaggaactttaaaaactgtacaaacatatggaaattaaaatacatgttcatgaacaatgaataaagaaataaaaaaattaaaaatttattgaaataaataaaaatagaaacacaacataacaaaacctgtgggatgcagcaaaagcagttgtaagaggaaaagtgcatagctataaatgcctacatcagaaaagtaaaaagatctcaaatagccaacttaacagtacacctcaagtaatgagaaaaacaaaaatatcaaatgttaaaattagtagaaagaatatcagaaagattagaacagaaattttacaaatagaaacaaaaaatataaaatacaaaaaaatacaaagagccaatggaacaaagagctagaggggtttgaaaaaaaaatcaaaattgacaagctttaactagactaagggaaagagaaagaaagccaaaataaaatcatagataaggctaggcatggtggctcacacctggcatcctagcactttgggaggccgaggctgtttggatcactcgaggtcaggagtttgaaacgagcctggccaacatggtgaactctctctactaaaaacacaaaaaattacctgggtgtagtgggaggtacctgtaatccagctactgaggaggctgagggaagagaatggcttgaacccgggaggtggaggttgcagtgagtcaagatcatgccaccgcactccaacctggatgacagagggagactctctttgacatgcttgaactttatgacttgtcctatctttccctatttcctaaataattagtcattctactttaggacaagaatttgccataccagctcctctctcatgtaacatttcttcataacatttctaaccataaacacatcttcatatccacaattttctttgtatctctcctccctactaatttcttatgcccacccaaatcaaacaagatcaggtaatgcaaggcaaaacaatagagccttagattttgagagggacctgtctgcctacagttcttgggattacatgaggaaaagagaggtttctcctaaaagggggtctgtggcaccttctgtttttcccatggattctcaggctgtcagaaattatctcaggtcctctcatgtgggcaccgagagtggcaacaagacagactaggaaagtaattcagacaactaagaagaaaaagaaaaacttagtactactttcattgtaaagacagataaactgaggcaccatgcagtttaaaattttatgttcacatagtgttagactccacagctctctcttttaaccatcctgtaattctgctaactctatgtccgtcactgattcacttgtatggtagctcgtgggccccttagagcttggaacctgggtttcatttcctgctctacagctatataatttaacaattttcctctggatttgttggcttctaacgctatatatcccaaattttattagtattactgaatattaacggaggctgtgatatctttagtctgtagaaatattaaacaacctacgaaggactatatgaggttaaatagtattaatatttctttatgctttaaaacattgaggcaatatattgagaaacacacctaagaaacagcaaccaatccattctggaccaaaatttagacactatctcttcaatataagctatctagtggcatttttacatatccttacacatatcaacagtattttacatgctcataaccttaaaaataaaaagtgtcaaaattatagaccttacgcattcctgtgggcttgaaaaatgatacaatatagattgtttctttaaagtagtcaataaaatgcataaacttctagagtactcactaaaaaaaaagatttcataccaaaggtagtaataccagaaataaaaaagggctcaacactgcaggttcttgaaggcaaaagttaataaagactttgttttggttgtgaatcttggccttaaaacattatacacatgatcctcccttccttttcctgttgcaaagatgtgatgaaccagatttgctcatgcagatgacaatactcttgaaaatggtggcagagaaataaaatgaaaggaatacagttcacttaatgagctcataaattggaactaattacccccctgactcttgcatagctctagactatgtgagagagatgaaatggctgtttgctagcaatattttatttgatgcttcatttttgattccttgaataactacttacaacacattaacaggatcatgaaaagcatagctattcaagtaaccaaataattatgcaatcaatgtttttcctcatctctaaagcatagtaatggactgattattttaagaatacaactcggtgacaagtagtttatgtttaactcagttttggtttgttgtttgttaaggccattgcttaggataatgaaaacaagaggaggagaaacaagaatataaacaagaaatagaagcagcagcataagaaaatgaagaggaacaagaagatgatgattagaagaagaaaaaacagactgaaagaaaggaagaagaacaggtgtgggaattagaaagcctattatgataccttatttcccctcctgatttatgaaatttgaaaaaatttcaagacttttcacaacaaaaccaagctaaaagatacaccaatagtcatcccctaaataagaataagacaatgttgccactcacacctggcccaggcaccagcaggaggagggcacctccagattctgcaagagaaggaggaggactcctccttgccatggctgggcctccactgctgtcacctcagcccgcggtacagcacccacagctgcctccccacttcaggccaggctgggcccggtgggctccacagcattcccactcccacttctcggatcccagacttgctgctgctgcgaccactaacaccaacaccaacatgaccactgctgctgttgccctcaatgcatgggcccaccctacaagcctcctaccacctggcccccgcagacactctcctaccactccaccactccggtcaagctgcagtctctgtctctgccaccaactgcagcaaggggagccacagaaccatgccatctgcaggctccagcctccagcgtgcaacagatgactcctccagctcctggcttgaagcatctgggtggtaaaagccagatgtgcctagaacaggatggaaggagtggtagtgttagaggttcaccttgtcatgctggtcactgggtggcaggagctggtttcggcaaaggcacaactaggacctggggtgggtgtgactgcctttgctgaaaccggcctctggctaggtccagctggccaggaactgctgggcccaccctggctgcactccttggtgagcaggagaagcagaaactcagacccagccagctctctccaaccaagtgccagttcctgtttctgatgcctccacccacagggccctgttcccccgtgatacccactactccgtgcccaggagtcccagattgtctctgcaacacagtgagagggtgcaggcccgggaaccatggcgggtgtgggggccttaccgtgctcaggattcccaaggaaacattgtgcacctgccacgctccagcacgagcaaacagaggctgccctctagaatccagagtctgggaagaggaggacggccccttccttggaggccacagctatcgctgccacctccgtagcccattgccagaagcagcagtgcagtgcaaaccccaatagtgcccccccactggcatgccacagggcatgtaaacctgatagtgcccccaaactgccccactgcctccagcagtgcagccagggatagtgcccccaaccagcccttgctgggggtagtgacagcccagatagtgcccccaacctgcccccctgccatgacagtgcaggagctgatagcacccctaaccctccccccagctgctggtcagccccctgtagcacacacaaccaccctcaccaccaggcagtatagcccccaccaactccgccaaccatgcccctgatacccttaccggcaatgtgaccttgatattgctcctatccatggtagtgcatccctggatagctcacctaccctgccacctttctaccatgctggccaagctgcaacctccgtcacctccaccaaccgcagtgaggtgagcctagatgccacaggatcaagcctccagctcggggtacatggctcccacttcctgttctctaagctgagctcccagcttcgattctgattggatgagagcaagtcttaggacaaccaatcacagcatgaaaataaagtccaatcagaataggcctagaagttttctctcatccaatcagaatatgtagtccaggaacctcatttgcataacctcacatctaaaggatgcagaaggggcgtcaggccattccagactcgtgtgtggctgcttgcgcagctgctccgtgccaggcttggaggaccaggagaaggggtagtcacttgccacagctggaggctggagcgtgtggcaccacggctcgcctcgctgtggtgggcgctggcggcagagacggcagctcggctggactggtaggagggggtaaatagtttttgggtagatggagggataaagagggtggttagcggcaaagggaaaagaggatggcaaacaggagaaggcattgcaaaaagacgctggggaaaagatggttgaaaaaagtttttgggtagctggggggtaaaaaagggtggcatgtagaaggaggaaagagagggtggtgggggggggaaaacggggacaagtaggaaggagagaaggtttacaaaaagacggtggggagaaacacggtgaagacaacagaaagacattggggaaagaaaagatgtgtaaaaagattttgggtagatggaggtgggaaagggtggcacgcgggaggaagaaagagggtgcagagagtggggggaagagagagaaggtggtgagcagaagggagagaagattttgtgaaaagtcgatggggacaagatggtggggaaatattttttttcagtagagaaaaaaagggtggtgagcaggagaagaaaaaagggtggcgagtaggaggaaggagaaggttttgcaaaaagacggtgggaagaaaagacagtggggagaaaaaactgtgggagaagtttttgggtagatggaggagagaaagggtggcaagcgggagagtggaaggacgattgggaaaacgacgatggaaaaatagttttggggtaaatggagggcgacaggaaggtggcatgtaagaggaggggcaggaatggggaaaagagggtggtgagcagaaggctttgcgaagagatggtgaggggggaaagacagtgaggaagaaagtttttgggtagatggagggggtaaagagggtggtgagcaggagggacaaaagagggtggcaagtagagggagacaaggttttgccaaaagaccgtaaggaaaagacagtggggagagaaaagtttttcggtacatggagggggaaaagagagtggcaagcgggagaacgaaaaagaggatggcgagtgggagggagacaaggttttgtgaaaaagatgggtagaaaagacagatgatggggaaagaaaagatagacggtgggtaaaatgtgggtagatgcagcgggaaaagagggtggcaattgggaggataaaagagggtggcgagagggaggagggaaagagttgggaaaaagacgatggggaaaatagttttggggtagatggagggcaaaaggaggatggtaaggatagaggaaagaagagggcgtttttgggtagatggaggttggaaaagcgggtggcgagcagcaggaatggggagaaggctttgggaaaatatgagggaaaagtttttgggtagatggttggcgaaaagggtggtgagcaggagagtagagaaggctttgcgaaatgacagtggggaaaaatagtgggagaaatgttttggggtagatgaagagaaagggtggcgagagggagggggccaaaggtggttgagaaaagaaggtgggggacaaagtttttgggtagaactttttctgagttttaaatcaaattatttgtatttttgctttgagtagttttagttttttatatattttttgttgtgttaaccccttgcctgatgcatagtttgcaaatactttcttcggttctctggattgtttcttcattctattgattgttttcgctactttgcagaagcgtttaagtttaatgcaactgcattttgtctatttttgctttttgttgcttgtgtttttgatgtgtatttgaaaatcccttgtaaccaatttcacgaggcattttcctatgttttcttctctagtagtttcatagtttcatgtcctacatttaaatctttattttcagtagatgataagataacagcctacatgtattgtgggtgttggattttcctagcagtttattgaagagattgtccttcccgaatgtgtgtttttggtgcctttgttaaaagagttgactgtaaaagcttgaatttatttttgagttctctattctgtttcatttgtctatgtctgtcagtcattggtctgtgtatctctgtctctctctcgctctgtctgtcccctacctattttttttcttttgccactaccatgctgttttggttactaggtttgtggtatattttgaaatcaggtagtgtgatgccgccagcttttttctttttattcaagattcttttgtctatctgaggtattttgcatttccatgtgaattttaggattttttttttttttttttgagacggagtctcgttctgtcgcccaggctggagtgcattggcgcgatctaggctcactgaaggcactgcttcctgagttcaggcaattctcctgcctcagcctcctgagtagctgggattacaggcgtgcgccaccatgcccagctaatttttgtgtgtgtagtagagacagggttacaccatgttgttcaggctggtctcaaattcctgaccacgtgatccaggcgctttggcctcccaaagtgctgggattacaagcatgagccaccatgcctggccgtttttttttttcctatatctatgaagaatctctttcctaatttaacatggattccattgattctgtagatcacatagggtgatacagatattttaacgatattcttctagtgcttggacatgggatatctttacatttacttgtgtctgctttaatatatttcgtctatgttttataattttaattgtgggatctttcgcctttttgttaagcttatctctaggtatcttttttggggggcattgggtaactactgcaatgaaatagctttcttgatttctttcttaggtgtttcactattggtacatgggtgtgctactcatttttatatattgatattgtatcttgcaactttatgaaatgtgtttattatttctagtaggtttttttgtggaatctttagggttctgcatatgtgtatgattatgtcacctgcaaacagagacaatttgactccctttatttccattttggatgccttttattgcattctcctatctaattcctctagctaggacttctagtactgtgatgaatacaagtggtaaaagtagccacacttgttccagatcttagaagaagagcttttaacttttccccattgattatgatgttagctgtggatttgtcatatatgaactttattgtgctgagattagttctactgttgaggccctctcatgcatttttcagttcatcagttgcatttttcagctttgaggtttctgtcatcttcttaaattacttctatctctttgttaaatttctttgataagtttctgaattacttctctatatttgattttcattgagtatcctcaaaacagccatttttacttccctgtctggagagtctcacatcttttttttttttttttttgtgagatggagtcttattccatcacccagcctggagtacagaggcacaatcttggctcactgcaacctctgcctcccacgttcaagaaattatcctgtctcagcctcccaaatagctgggactacaggcacctgccaccacacccagctaatttttgtatttttagtaaagacagggtttcaccttgttggtcaggctggtttcgaactcctgacctcaggtaatccacccacctcagcctcccaaagttctgggattacaggtgtgagccaccacacccagttgagtctcacatctttagctttggtcactggtgacttatttattgttgttatttatttccttgaatgttcttaacgcttttgagcatatgttcatgcctgggagttgaataagtgtgtatttattccactttttgcagtctgttcttgtgtgtgcttgtccttcttcagtcttccagaaattccaagaaattcaagactgttgagttccccaagcctgtggtcactgcaactgttacagcaccagagggcaccttaagctcaggttcaccatgacttttgcagactgaggtccctggtggccgtgacacacttggagaagataagggaggggttccctgggttcccagacaaagttcttctttcacgtccatcttcttccccttgcaaagaatctgggcaccagactttgtgaatctgggcactctcatgtgatttgggcactctcatggccactgcagctggcgcaacacacctgaagcccacagcctcccagaccagagcagcactggggtttatctgagtcctgtggccactatattgcctgactgctgctgacttatttaggtttctaagccaggttagtctgctggtgatgaagctggcctgggtttgggtccatcccgccagggtggcagaatcccttctccctgcaggggggtctgtaggtgtctgggagctcctgcctaggatcagggccacagtattctgcctgatgctgtgtccactgtggtagggctgacaccgggttctcctctttcttgcatagagaaggaattctctctgcactgcactgcctggagttgggattggggtaacacaggcagccctgtggccactgcagctgatgtcacataggaagcccacagcctcccagaccagcacatcgttggttgttggagctcacccaaggaccaaagtgactctggcctgcctgccactgaaatttatctggggcctgaggccacttgaatcagctggtggtgaagcaagtcaggactcaggtttgtcccaccagggtagtggattcccttttagaccaagttgtgtctaaatgctgtatctatgggcactagcctggaacgaaaggccatggggttctgcccagtgctgtcctttactatagcagagctgccactgggctccaaggcaaagtcccacagacccttccttgtccctcctgcaagaggtggacacattctctgcactgcactgcctggggttgagggaggggcagtgcagtcactgcaagactgtcttttcaccctctttaatgtgtgttctcttgtttttaagctaaaaccaggttctgtgatctgtcacctgctttctttagctcttgtgaaggtattatcttgtttggattgttggacggtggttcaatttaatattcctgcagagacacagtcactgagattctttcctccatctcgctccacctcttctcatttatttagttcttcttcagtttatttcaacaatgctttggaggtttcagagtattagttttgaactgctcttgttaatttctaaatttattacttgttttgttgctattataaatgggattgtttcttttatatcattttaaggcagttcattgacagtatatagaaataaaattaatttttagtattacatttatatctggaaaccatgccaaatttattattttgaatactgttttactgaatttcttagaattacatatatacgagatcatgccatctgtaaatataaataattttatttttttttcaatcaggatgttttcaattttctattctttactaaatacacctcgctagaatccacagtataatgttgagtagaatttgcaagagtggacattcttgtaactaaccctgccaggaaaggattcaccctttcattgcagagtgtaatgatagctgtgggtttcataggtaactaccactagtttcaggaagttatcttactgtccataactggagtgttttcatgatgaaaatgtgtaatattttctcaaatgctttctgtctattgagatgctcatatattttggtcttttattctgttaatatggtgtttgcattcattgatttttcaaatattaaatcaatggggcattcctggggtcaatcacatctgcacacagtgcataatctattttatatgttggtgggttcagcttggcagtattttgttgaagatttttgattttataaaacaattaaagacactggtctatattgttttgttattcagttttggtgtcagagtaatcctgtttgtaaaatgaattgggaagtgttctctgcccttttattttctgcaagggttgatgaacaattgatattaatttctcagagtgtttgattcacctgggaagctagctgagatgagatttttattgtaaggttttaaaattacaatccaatgttttaaccttccatagatctacttatatttttaatttctcctttagactgttttagtttctgtcattctaggacttcattctgtctaggctatcttactttttcggcataagatttttcattgcattctcttttaatcatatttattttgtaatactgccagtgatgtgttctcttttattgctgattttaataatttgagtctcttctctttttttcttgcttagcctaagtaaacatttgccaatttttttatctttccaaacatttcattttggtttattgattttttctgtttcgtattccttatctttctgttatcctaactctattttccccccatctttatttttttattgtttttttgagacggagtctggctctgtcaccaggctggagtgcagtggcgtgatcttggctcactgcaacttcccactacgtggttcaagtgattctcctgcctcagtctccctagtagctggtattacaggcacacaccactagttccagataatttttctatttttagtagagacagggtttctctgtgttggcaaggttggtctcaaactcctgacctcaagcaatccgcccgcctcgacctcccaaagtggtgggattacaggcatgagccaccttgcctggccagcttaactctaaggaaatgtttatctttaggaacattgtatttggttaattaaaattttagattctggagcatcaactgttctcctacatgaaaataaaagcatgaattgggaaataatgggttccccaatttttttgtggggggaacaaaacaactatccatgtacatacagtttttggttccccagatcattgagccaacttggccaaaataagtaatccctcattccttatctcaagaaggtggtcttgccttgcttggagatgttaaaatgaattcactggatgtagtcacttttaagactattagtttacttcatgtcccattttcagccagttactgtacctggaataatagaatcaaattgtgtcatgcacaggtaaataagtaaattctgtcatttaatatctaaattatgtatatatatttacatatacctatattttacttgtaattcgatgaagataaggctttgtatgtatgctctgtgtaaaatatgctgtctatattctcatgattacaaagaatagtttgagtaatggaatgtatttgaattttacatatgtctttcatttactagcagaaataaaatcttagccttgatttagtaaattcctccatttaaaataagatgttactttagcagaaacaaaatttatcttaatgggataataattcactagtttacctctgatgagcatcagctaatatttaatctattgtgaaattacacagcatcaaaataaaatataatacagttagttaaaatagaaaaattatcttattgattaatttagacatcagaagttagattataaaatcaaggtattttttgtgtttgttttgtttttagtatattagcatatactaccaaacgtgaaccatagtaaaagctgttcagtaacacttaccattccattttcaaataacccgagtttatgtgtcaggttgaaaagcttttagatgagtggtttatgttactgtatgtatccaaatatttgtatatcatgtagacagcccaagaacatatgcacgtatgttagctattgcatagaatggtaaagaatacattcttaaaagaaagaagagagtaagatacattcacttaatgttccaaataggtctctagtatctcaaatgtactattcacccattactttcaaacattatatcagggccaggcaccatggctcatgcctgtaatctcagccctttgggaaattgacgtgggtggatcacttgaggccaagagttccaggccagcctggtcaacatggcaaacacctgtcttgactaaaaaaaaaaaaaaaaaaaactaggcacggtggcacccccctgtaataccagttacttgggatgttgaggcaccggaatcatttgaacctgggaggcaggggttgcagtgagctgagatcatattactgactccagcctgggcaacagagcaagactctgtctcaaaaaaacaaaaccaaaaacattatatcatggtatgtgattaatctgaattcaaaacatcttaacataaactaaatgaaaattatacaaaattttgcttgttttattgcattctcctaattcctctagcatctatttaattctatttgttttgaatttaccaacaatttcacatcttgctgagaatatttgcactgataaatatttttgtgattattgattatattcaaatgcactctcattttcaaagcaacatgtataaaattattattaaaattgtacatagcttgaaataatgtaattgtcatgggatacatttatatatcataattaaaagcacattacaatgcttgtacctgatcttaatattacttaaccttagaaatatagaataaatgataggaataatatgggagacaaaagactgtgtgaaaagccacatattgtatatctctattgtgtttattaaactttttttcccactgcacttacaagtaaatttgtcatggaccatggtaatttttattgtaatcttactgtaggtacattctgttagcaggttaaataaaatacatgatcaaagtcaaaaatatatgcaaggaaaatatagaaaatttaagttataaaaagctactgttggtcgccggtggccggcaggctggcagccctaacacaggcagggctgcgagtgcagtcacccaggtctgcaggagcagcaggccgaggccagcggagatgaccccgatgagcccacttcaggtcggggctgggtgtgggcacatggttcccggcagcgtgtgacccagtcctggccagccgctgccctctgcgggccccagggctgcgaagaggccttctgcctggggcagtatcaaggctgcagagttttcctccaaagccacacctcgactggaaggggcgagttcgaggactctgtgggtggtagccatgggcaaatgcagagctgctgctgttgctttgcagtgcctataggacttagagggcctggagcatcagttccctgaacagcacccagatcaccctgtactggggacacagttcattccccccttccctaactctgcagtaaaatcttgaggctgtcatctggggaagccaccttgtccgttcagccatgaagacagaaacagtgccatcgttccaggagactccagctggatccagctgtcacctcaataacctgttgagtaggcggaaggtgatggctgtgggggtcttgcttgctggctcctggtcatacaccttctggtcagcatgtggctgctgtgccttctgtctgcattgctagtggtgctgggaggatggctgggctccagtgtctctggagtggcttcgagtccactgctcctggaaggcttcatcccattggccacctgtcctctattccctgagacagaaagacaactggaacaggagatcaactgcaccatccagatgtgattatttgagattttatattatcctggtaccattctgagagccaggagccagcctttgcagaggaaatggaggcagccatgaaagagttggtccaggagcttcagaggaggatgagcatgatggaccatcatgctcttgctcagagtgttctgactctctgtcgtttttcacctgcagagctacattcaggcaaaggagaccactacagggaagaatggtccagttgagccttcccacctctgggaggcttactgccgggctactgccccacatcctgctgtgcacagccccagtgctgaagtcacctatacatgtggtattgtgaatttgttgcttcaagggctggtgcccaagtcccacttggagactcatactggatgccatgtagtggttgaactcatcatatgcagtgtagtcttaccattgatcagcaggctgtcagatcctgactggatccaccttgtcctcatggttatcttttccaaggccagagatccaacaccctgcccagccagtggccctgaacagccctcagtgcccacgtctctgccacttattgctgaggtacagcagcttccagaagggagggctccttctccagtagcagccccagggttcctaagtaaacagtgagccagagattcctgcaggcccctcctcagaggttgaaggtggccacgaagctgtagagggagatttgggtggaatgtctgaaaaaaaaaaaagtaggaaacaactcatctcatttcctatagccaaatacttgaggccccctgttcttatgtggagactcagagctggagtctccgctgtctgaagtaggctaagaaaccatcatgctcatgactccaggccactttctgtctgacaggattcaggatgccctgtgtgccctagagggttcccaggctctggaacccaaaggtggtgagggatctgaaggagtagaggctgagggtccagggacagaaacagagacagtcctgcctgtctccacactgaacttctgcccagagatacagattgacatagcagacaaggagatagaacaaggagaagttaccacctctgttacagctttgctggaggggctggaaaagacctgctcctcacggccctcatgcttagagaaggatctcaccaatgatgtgacctaccttgatcctagtctgctaccagttcagttctgctttcctcctcttcacctggtcctctcagctcagccatcttcagctttgaacccctaagcagtccagatggcccagttgtcatccagaaccttcatatcactggcaccattacagcccaagagctcagtggcaccggattgcaaccatgcacacgctatactgtgaagtgtgagacatcccttgatggtgaaaacagcagcctgcagcagctggcctaccacactgtgaatcaccgctattgggagttcttgaatctgcaggccatcaggagaagaaaccagatctatgaaagttcattaaaaatgtgaagggttctaaaaagctctttccagatcttccatttggaaaacatagacagtgacagagtagaagcccgaaagagcctcctataataattcctgaagcaattgtgtgccattccggagatcgctaacagtgaggaggtgcaggagtttcttgctgtgaacacagatgctcacatttcctttgtcaagaaaccatttatggtctctagaatagagaagatggtggtgagtgccattgtggacaacttgaagacagcatttccttgctctgaatcccagggcccaacagaggagctgagtgaggccgagactgaaagcaagtcccaaacagaaggcaagaaggctaggaagtccaggctgaggttctcatccagtaaaatttcgccagcattaagtgtgactgaagcacaagacacgattctttattgtctccaggaaggcaatgtggagtccaagaccctatccatgtctgggatggaatcttttattgaaaaacagacaaagttactggaggtgcagccaacagaagccccagaaaaagatcctgaacaacttcccaaaggacatgtggacagttgcttgtcagatgcagctgtgccagcccaagatcccagcaacagcgattcaggaacagagacagagttagctgacacagccctgaatctgcttctcttgctactaacagaacagtggaaatggctgtgtattgaaaacatgcagaagtttcttcgtcttatctttggtaccctagttcaaaggtggctagaggtgcaggtagctaatttaacaagtccacagtgctgggtgcagtacctctggcttcttcaggagtccatctggcctggtggagttttgcctaagtttccacggcctgtaaggacccaggagcagaaactggctgctgagaaacaggctttgcagagcctaatgggagtcttcccagatctcatagtagaaattcttggggtgaacaaatgccagctgaatgtttagtcttggagtcactacaacaaccactcatcaacaggcatttgatttactgccttggggacattatcctggaattcttggatctcagtgcctctgttgaggagtccgctgctaccacctctgcttaagataccccaggcagccctaagaggatgggtgtctcctcatagttggttattcccgcatccttcccaggtcagggaagtagagttactcagccacccagagaccagtgaggaagcctgcatcctctggaagtaggctacagctcagaaggcctaggctcccagtggctcaattctctcccacttctccatttgtagcaggtgacacagggtatgtgtcccagttgcatgcacatttatttccatgtcccttttgtggtgttgggattgttgttggtgagtagattctgtttcctttgggaaaagaagatgtgaggtagaggaacaatccccttttgcttctccttttgccgtcctccctgagattgtttgccagaaccctggccctgtgcacagatgtatttaatccaccagcacacaagctctggatagaacaggaaaaaagcaatggccagatttccttggaggaaagaacaaccttctgagctctctgttcctacccggaaactaaaaattcattctgggccattctcaaaaaccagactcctgggtcttacctagtttcccaacagttccagaagaagaaggagggaagaaaatttttcaagggacttcttgctcatgtgttgctgtttcccaacacatcagccttatggaagatgtcatcaggctgcttccctggaaggctacacttttcctttccagaagacttcaaagctgattgcaaaagcttctggtaaatccaccgcacccttcacaccctttcctgaaaggcatttgtaccacacattttatttattgtctctcctcccaaccccctgccctagagcaactgggtttttgaatttgtgaccctctcattatcttcagcaaatttgcatgacaacttgcatattcagcctcagcttttcccaggagaaggtaaagcacttgcctcctgtcttaagaatgcaaaaagagtaggaatagcaagctgggggagtgaaatctcccttcataagtctttgatggggaacttttattgctctgaacaggtaagattagcaaacttacaaggaatagcttcttctttcctgttccttatggttataattagcctttaaagaactccagcaaaggtgttctgttaggccacatctattagaaaggcaaagaaattaggaattgctggaggagaaggataaatcaggaggaattgctggtagaagaggatgcagacagtcacagggaagtggtatatattaagtacacatgaatagctggcaaaaaggtgtcagagatgttactcggagccatttggcttcacacttgcctgttagtgccttgctttcgctgaattaccagagcctaccgcttggaggaaggtcttggagttagactaatgagaaggcaatggggtgccaaaaacaggtgtcagagttctcttagattctgaagtaggtggtgagcacacaattaaagtggtttgtggaagaaaaaaatgcttctcttactgaatctcttgattatagtttataatcaaaattattgtaaaacttttctccatttgtaagtaattacacatataaagtatctccctcattcggtagatttcatatttctttcagaaatgtatatcaagtataaaacattttgaattctaaattgcacttaaaattattcattgttggttatataattataaccaagtacattaatgactacatactgtaaactttctttgccatgtggcacaaatagttaatttaccttttctttctctgtttatctatcttctatgtcctagtctatttcagttttctctcaagtagtggttttcattgaactaccaaaaagttgcaggtcaaccacacttgaagaaaaacgtgttaataacatatagtttaaagctttttttatttataaaattatattccaaattgttaaattaattttattatgcagacttgatgtctgaaaacttcttaaaatagagaagttcacaatattagatactgtgtctttcttcatataatgacaaaagacttcagttctgaaattttaggaaaagttttgctttaagattaattaaaacataagattgcataagcagagagcatgtaggtacggctattctatggaaaacttattttgttattagaactgttaggaacatcttttgagaatattcaggctatatatgatgctgcaaatttattttcataattgctataactggcagggcaagcagatgatatgtttgtagctatctcgttgtaagcacatctccaggaataaaaaagggccttaagaagagggaggcaggtggcacagtaatcacatcatgaacacagatgtggtggcccctgagaaagagtcatgatgacagctgcattctttgtttctatctcatatgtaatctaatttcaaggaagtatcaaagtgtcggggtggagagaggataagaatcactagcatgaaatctaaagtgcagtcatccagttgcctgatgtcttctgaggtggttcacccagattcacaatacagataattaaattcagagctgcagagatagggaaaataagatgtggaaataggcttcttctgaagtattattcaggtctcctccttttcttccaaatgccatccccatcagtatactcaaggcatctgatggcattgatgagcaactgaaaaatcatttaattaatcatcaggttctttatccttacttaaaaatgtagaggcacaaaagtcatgtgtcaaaatatgctcttttttaatagagtgtggtccactacccactgtgtgtcctcttaacctttccagagtaggtgtccttacagcataaatttagcataaaattagacacgttccagtataaaatataatgaagacataataagccaatactgaattctttagtgaatctagaaaattcactttaatttttttttctagaaaatggatttattttagtgtatttatttgtttttgcatttgcctcatggttctgcatggctaacttgttaaagtcacaagatatcgtatattgggtggatttgcaagcgatgtttagtgttttcttccctgatgaaccaacataaccatcattctgctatgagtctatgttatgaaatatgtctatgtcctgctattctcaggcttcatttttgcctctaaatcttccaggtactgttgtttttgacaatgtaatggatattacttctttctgtgccttcaaaatttcagtaaggaaataaactggttaccaaaaacacctgtttgttaaaattggagtcaaactttttaaagaagagatgtactttgttttctttcctaaatatttaaaaattaataggatttatccatagtataacatggttttaaaaagtaatttaactttagttttattgaatacctatttgtgtagtatattacatttatttttgttaatattaaattttttaaaatttaggtataaattgtgcattttatatgatatttataccattattttactttgggttctctcatttaaaattataaccaaagttacactgttattcatgttttgtgctatgcatttaatattttcatggattccttttttttctattttcagctagtatatattgcattatatttaaaaccaccacaacaggtaggaaatggggagttgttacttgatggctatagagttacagttttgtgagatggaaaatttctgcagctctgttgcacagaaatgtgaatatagttaatacttatgatatctacacttaacatgattaagatagtcaattttatgtgtatatttttgctgtaattaaaaaataccatcacaagtttgaatgataaataacttattttgtataatattgagtgtgttcacatcaataagaaaagcctaatataccaataagaaagagttaatcggaccaggcatggtggcacacacctgtaatcccagcactttgggaggccggggcaggtggatcaactgaggtcaacagttcaagaccagcctgggcaacatgatgaaatcccatctctactaaaaatacaaaaattagctgggcactgtggcctgtgcctgtaatcccagctactctggaggctggggcaggagaatcgcttgagcctgggatgcagagtttgcagtgtacagagattgtgccattgcactccagcctgggcaacagaacgagactctgtctcaaatgcatacatacatacatacataaacacatacatctgtccattacaatattttagagatgtgaaaaaaagttgcataactggtgacttgaatatctatgtttttttgtaagctctactaatacattgagagtagttattcaaggaataaaacaatgaagagttaatgctaattttatgttcacatagaaagtattagtagcagaaagcgatttcatctcagagaaaaaggaaattcttacataacataatgaatgatgcaaccaggatacaagaaattataacattatttttgtatttgtccaaacgttatttgaaaatcctcagtgcacatactttaagaattagggttaaggccgggcttagtggctcacgcctgtaatcccagcactttgagagactgaggtgggtggatcactttactttgagcctgttggtgtcattacatgtatgataggtcttttgaaggcaacagaaggttgtatcttgttttctttccaatttgccactctatcttttaaatggagcaattaagctgtttacattcaaggttaatatttatatgtaagagtttgttctgttgtagtgtcgttaggtagtttctttgtaatcttgattgtgtagttgctttatagggtctgttagctttatatttatgtgtgcttttatgataacaagtatcattctttcgtttccatttttagaactcttaaaaattttcgtaggactgatttggtggtaacaaattcccttagcatttgcttgtctagaaaagacattagttcttctttgtttataaagcttagtttggtgggatgtataattctttgttggcatttatgttttctttcaaaatgctaaaaatagacccccagtctcttctggcttataaggtttctgctgagatgtccaccattagtctgatggtattccctttatgggtaatttggcccttttctctagcttcctttgagatttttttttatttcacattaatcatgaatagtctgatgactatttgccttgggaatggtcatattgtttagtatctctcagtagttttcataatttcatatatctggatggcaatgtctctaacaaaattggggaaattttatttaattatttcctgaaatatgctttccaatttgcttactctttcttcttctttctcaggaatgccagtaagtcataggtttttgttgtttaacataatatcatataatatttcttgaagactttgttcattttttaaattctttccctctctttttgtctgactgagttaatttgaaacgtggtctttgagctctggcattctctattctgcttgtctagtctgcaattaagtcttctgattgtattttgaaattcctgtagtaaatttttcaatttcagaagttctgtttgggttttcattaatatacctatgtcatctttcatatcctgaatcattttcctgtttttttttctattggatttcaacatcctcttgaatattgagtttccttacaacccatacttagaaatttttaatttgtcatttcagacatttcaatctggctaggtttcagtgctaaagagctagtgcaatcctttggagatgttgaaacactgtgattttttgtactgctggagttcttatgctgatttttctcatctaaggaaagtgttgtttcttatttttgaatttgtattgtttggatggggctctttatttttttttcccttgagggtgtaactgtggtggatgttatgtattttggcttagtttctgaatgcttttggtgggcgacaaggctctacatgttggttgtggatatgtggatacgttttgtgtggtggctttatcagatattgtttggtatagccatgtattttttatttgatggtgcatttcaggctgtagtccagtatatagcacttaggagtatgatatggcaggtaagctgctgcccattggatgaatttgcactgatgagcatggtgggaagagatcatgatggagtgccctgaagcctccaggaaagagatggaggggtgcaccagctcttcatcctgaactagaagaaatgcagtctgcttccctatcatatccctgtcacaggtctcatgaccttgtttgtaaaatcttcatcctttagttcccagcacagtgcctttgtgggccatggatctgcctctctgatggctaccactataacgagggtcagggtagaacctcttcctccagtacaggacacacaactttgtagtctatcctctgttgtcagggtgctgccactctgtgttggaagggggagttggaccccaccccttgtgaaagccacagcaggcacagtctcattttcagcagggatggatccaccacccctgctgaaagcacaaagaatcactttctttcagtgcacactcaccagctcttgcaggaagaactgctactgcattcataacagtgtacggtggatgaaaggtgggagacgatcttcttcttcataattattcctggatattgatgctgtctcactcctcatttggtgccacatctgtatttcctttgtcccagggagtactttcgcaggctgtgctccccagctccttaaaggggtggctccatgctgagagtaagatctccagagaacctacaataccccaggcacccactggtcccctgtgcttgccaaagtcagagcaggttgtagagtatatttgcaggtggtctggtggtgcaatgacttaagggcagaggatccttgggaaggaaagtgacacactggtgcacaaccagtatggtgcccaccatctcagttcaggtccaaggggagagtgggtatggctgtgcgagctggccactggttctgtgttctcaggaaattctctaatcatcactgattgtgttgccctggctagcaagcgcaaaggggctccccaaccgtttagcactcggcaggtcgtcagaggggtgtagaaagaagcaacttctacctaccattttggctgagctctgagttgctcagaggttgatatcagccagagtcttgctgcattcttcttctgggcttcaacttcttcgcgtggttactccaacaggtcctcacttctctatattttccattcaaaacttgttcattcactggtaactttgatctttctgagaagagctggcatgtaatttccccagtcagcttgaaaaaaaaaaaaaactttttgttttcagaatgtatacatttatcactataaattttctccttagtactgcttttgctgtatcccattagttttggtatgctgtgttgtcattttcattagtctgtaaatattttctaatttctactgtggtttcttctttaatcaactgatggtgtaagagtgtgtttaatttccacgattttgtcagttttccagttttacttctgttattgacttctcactttaattcattgtgttcagaaaagatattttgtgtgatagctatcttttaattctcctgagacctaatttgggcctaacatattttctgtcttggaaaatatcccatatacacttgagaaggatgtatatgctgttgttgggtaaatattctgtatatgttagaacaatttggtttattctcagtcctctattttccttacctatcttctgtctggttgttttatccatattgaaagtagggtattgaagtcttaaactgttattgtagaattgcttatttctcccttccattatgtcagtttttgcttcaaatattttgatggtttgtaagcgtttatgattgttatatcttcttactatatttaacccttcatcagtatataatgtccttttatgtctcttgtaaacatttttatttaaatcctaatttttctgatattagtatagccacccctgttgtcttttgacacaacaccctactctcttgacttacctagccaggttttagtgaaaaatcctgttaagtcagtttggtaagaatccctgcaaccttgaaatcaaatttgtttttttactgccaacctttgatagctaagttcttggccagcctttaacaagaatccttctaagccaaccagtgatctctgactgctgttcagaagaaacgagggatggataatgtaaaaatctgaatcaatatttctaattctgggcacatattagaattggctagtaatctcatattagcttggttccaacaactgcccagctcacggaaagccttctaatttagtttacttcagatatttttacttattttgctctactcttgtggattatatcgctgttgtactctctgtgtaggaacataggataaacttattcaatgtttccttaaattaaacacttactaatctcccagatatcaccttttgtcagaactcagagttaggaatggccttcaccatactgatgctttctgactgagctcctctctaccccaaatacaggggaccctaataattaggcaggaatatcattacccctattcagcctgaagaagtttcagaagatggatcttcatccctttgcagcccttggtattaaggattctcttataaaagtgagggggaaatgtcagaggtgtttgaaccagagcaactccatcttaaacaggagctaggtaaaataaggctgagatctactggactgcatttctagaaggttaaggcattctaagtcacaggatgagataggaagtcggcacaagatacaagtccctgacgaaacaggttgcagcaaagaagtcagccaaaacccaccaaaatcaagatggtgacaagagtgacctctggttgtcctcactactacacttctgccagcgccatgacactttacaaatgccatggcaacatcaggaggttaccttttatggtctaaaaaggggaggcatgaataatccactccttgtttagcatatactcaagaaataaccataaaaaatgggcaaccagcatccgtagggatgactctgtctatggagtagccattcttttattcctctactttattaataaacttgctttctctttactctgtgtactcactctgaattctctcttgcatgagatccaagaaccctctcttggagtctggatccagacacctttcctgtaatgaccatgtatgaattgaaaaaatgattagacagagtgaaaaacagattaaaaaattagttcttagtgtatgatttcaattttctaaaactctacaaaattcaaactaatctaaagtgacaaaaagtaggccagtggttctctggggggaggagagtggacaggatctccatagtattacaagggatcccttgggagtgatttgtatgttataggtagtgatgttttcttgttagtttagcacttacttattgtttgtttgcttgtttacttgctttctgtgtcccctactataattgattatctgtagccagggttggcaaattatggctccatgggccaaatctcactcatagtctgtttatgtatggcccacaagctaagaagtgtttttatatttttgaagggatgtaaaaaagaaaaaaatgcaacagtaaggaacaatatgcaacagagactatatgcacctcataaagtctaaatatttaatatctggcctgttacagaagaaatttgccaatctctgctctatatgatcaattatctcctattctattcacatatacgtggtagccagtatattacaaaatagctagaagagagtgttggaaataaatttttggtgccgcaaaagaaatagcactcgaacatgaattttctcagcaaggcagttttacttctatagaagcgtgtgtctcatggatggagcaacggtgagagcacacccgaacaagggaggggaaggggttcttatccctcaccacccctactgctgtgtcattcccctattggctagggtcagaccgcacatctaagctaattcagattggctattttaaagagaacagaggtacgagccagagtggcaggatgagtagtttggtgggaaggacagttacagaaaaggtgactcaggatgactaagaacagagcaggtgaccaaggatgaccaagatcagagcaggtgaacaagagtgactaagatcagagcaggtgatagagggtaggaggaggttgtttactgaaactaggggcaaggagacataaagaacaaggaaattcaactttaaaatgaagagcaaagaacggggagccgaacatactgatacattggttctttggagaggatctcagaactcattgtatttaacaatttacaggctaaaacttttgaggaggaatttatgatatcctacaattttctccctttcaattttcatagtatttcctcttcaaactttttttaacatatcttggctttgctgctcaacttaatcctctaaaagaaaaagctgatctgaataaggtgaaggagagctaagggaggttttagtaaacgctgcatctgtaagtctttgcactagcccatagatgcatggtatgacacaacactggacaagaatgagtacacctactacagctgcaagagaaataagaattgaggctatgattcctttccatttaatgagccgtttttctagccaccctgtgaaggggtcattcactcttgagtttttggctaactcattgaacagggcagttagaccttgcaatgcctttgttgtacttccatcagggggcggtgttgtttgggatgaaggtacaacattgagttttaatcatgatgcagactcctcctctttctgctaatattatgtctaaggctattctatttccccaagccatctggctagtaggccctaattgctcagctattcctttaacagcatctctagtgtagttaataaaccgctgttggttgtaataaatgcaatttatccaatctatgtttttattcattgtcacccaccaaaatattgactcaaatcctgcagctatttgatctctggctttaaatttatctggtaatcctcatgggaccccaattacatctaaataaatgcgagagtcagaagacacataaagggcttcccttgttttatgatgttgtatttttcctctctctggttggtgaaatgccagggtgaaagggatagcctactggactagagtacaagtgccactccagttacttggcagagagtccagtaaaggtccaccacaataccaccatacatctgctcagggatgaacaagggctgactgattggtaagctcttggaaagtcttaagctcattgcatcctttcaggtctccaagaaacaccaagtttcctccctgtcatgagagacaataagtgaaattaatgtggggagatggaagctggatggccttcaggggctgacctgcagagtgttgaacttcgggatatagcagagagagaacttgacatgacttgttaccccaggctgtgtaatcctggaaaagagctaccatgcagcccatgcctggtcgactggaggaccaccctagtggaaaggggtcaatctgggcctctggcctgccatgcactcaagcataacaattgcttttgtttcacctgcagacggaatatttgatccattccaaccaggcatttgcatcttgatatcctgtctctattgctaaagtttgttttaaatcatttacttctacagcgtctactttggtcctatcattagatggaggagtaacaactgtttcattgtgagaggttttggaagaaggcttaggggaaggtgtaggtggtgggggatcaatgaaacatatttcaaagtatctgatagggtctgttcctgaaacctcatctcccataccataaaaaccagcttaaagaagggaaccagcttagagaaggggaagatctttgagggtttggggtaataacctgtattggattgcactggtttagctgacagctaggtgaagctgttcctttagtaaaatgaatgtatggctttaggaaattacaactactggttgaggcagtccatccttgctctttagtggtccacagaacgttggaccaactgcagcataaaagctctatggggggcaagactcccagctgatgccagggtcctcattgaaatcttcccagactaaatgatcccaattcaataatgtccagtctgagaagagccaggaaggacagaggtacttttctgaagtggagagctgtctttgacttaaaaagtctccataggatgtaacaaggcaagcatcaaatttaatagtttgaggtgaaattgacttggttacattaataactaggtggtcagcaatagagtgaggaaagaaggagtaacagaatagatgaaaggaagttaaatttttcttagctttagtttggtagggttttcccctgggactatggcccatgactctggagggggtggcgctttcttgactcaggtgtaacgggtccatcctttttctgctattcggactgcggtttcagtagttaggagcattaggtaaggtccttcccaggccagttccagcttttccttctctccaaattttgatggggacgtggtccccaggctgatgttggtgtactgggaactctagaggtggcacctgtgctaaaagacctttagttctgagggaagataaaatggaagataaaccaagtatataatttctgagaaactgatcttttgtttcaaatgtaggaagatcagtagtagaatgtagataaggtgatccataaagcatctcttaaggggataggcctgtgtcttttgggggagcagttcagactcttaacagggtaataggcctttctactttccctaatgaagatgagtgccagggagtatgataatcccatgctacatccagtacctgggataatttcttaatgacatgtgccgtgaaatgagtcctattatctgaattaatgttttctattaatctaaacctgggtataatattttcaactaatgccttgactacattattagcagttgtacttgaaaagggaatagcttctacccaatgagtaaggtgatctactattactaataaatatttcagacgaccaattggaggcatctgtgtgtaatcaatctggatactttggaatggccttaagcctggactccttcccccaaagggtaatcttttactaagcaactatctgtaacctgtttggccagggtataaattcctatgcacccataaactctgaggactgcatcacacatggcttgggacccacaatcggtcccttgatgcagttggaacaagaactcccttataaggggcttggataacatttctctctggtctagcaatatccattttccttctaaattctctttagcacctatttttattagtttttagaccaaagaaagccaaacaccattttatatttgacaatgcttcctgtatgattttataccagataagctaaatttcacctttatattagtgtgccattaatgttaaactcaattttaataaaaccttgtaggcatatttatccaattttaatgtctgaccataaggtaagatttttatagactctttttaagcctttataatttttgttaaagaacaggttagtgctttaagaaaaacccgtcgtgcttttattttaatgtccagtttacagaaaaactgtaccagtcagcctgagctcctgttatctgagtaactttgcaaggaacttgggtaccctctttagtgaaaaacataatattcggagacatttttgcatactaggaataggaaaaagtgtgtgagaggataagcagagaatcatattttctggacaaggcacactgtactccaactataatacacagtaaacgtactactgtaagcagtaatacatttaaaaagtgtgccatctgggtcaaagaaatcaaaaaaacaaaacaccacaaaacctgcgtaggaaatccattctgctattttctagctttataatattgcaccgtattcttaatgcttctttatcttatttttatcatatgtaaaatgaaaggaatgaatatatcctagagatattttaaagcttaaaaagatgtaaaactattactacatttcttgttgttcaatgtcaactcagttgtaattagtactagtaccacaaaatatcatttgttttatgcataaaattagaatatgcaaaaatattgtaaaattttggaagtgttgtattattgtaaaatgttttactacgtttttatacttactttttttacttatacttttttgtatttaatttttttcttaaatgctaatgcacatttgttttctttttattttgttatttcttaaataactcggaatgctttggctcagaaacatgtttttcccttcactaataggaattattgaatccctttaggagactctaaagactgagtctggaaaacaattggttaacattataccagactgtgactagaacccagtaaaaaaagataggaatagccttgaatgctataaaagaggaaaagcctaaaatagcctgtagtggtgaatccccaaaagtcttggtcttgtaagtgatcaaggaggggtaaatttatgatgaaatctaaggtcttgaaatagggttctgtcattttcagagcttacttgggcaatttaaaaatgaaacgtcaactgaattaaaaagtccacatagaaaaaattataatatctaccaagtactaatataaaaatactctaagaaggtaagatcataaaaatctagggggaaaatattttatactaagattcagactcctactatcatgaagataggtggtagagaattataactcatctctggttccccagattattttatcagtattaaacagaagttaacataggccaatacataacacaccagtaaataatttgttcaggtggttgtttttcatgaacaacatatattaagcagccactgtgacgaagggtttgtgaaagtgttgaaagtaaatgccttctgctggttagtcatgcccttttacattttactgtatctttcacaccattcatagatgtgtcttcatgtgctgtcagatatatagtgcagtataaaatgcattcgtatctagatctatcacatgctgtatatcacgtatcatatacttataaatagatctgttatctctgtggcttggagatatgcacctatcattactccaaagttggtgtgagtggtactgttttcaaagggagagataatagtatattaaccatttatttataaggcaatgtcattttctcaatgtcatcaaagtctatatcttaagttttaaaataaagaatacaaagtaggaaatttaaaaaatatacaatggagaaagaatacttaaaatcactaaagtttatttcatgagtttttattatcattacagtttgcttcgaatcaatcaactgacctttcccacaggccaagttgatttgctttaagattacagtgaatccacttgtaagtgtatggagacagggctaaagtggtaacagtctcataagtttactttgtttctaggaaaagaacgtttcttatgactacagaaacctgaccaagcttctgataccgactcttcagttttgacatagctgccttcacttctttgtttcttagcatgtagattacagggtttaaaatagacgtgaagatggtgtagaatacagcaaggactttgtcaactgagtaactgctgaagggccacacatagatgaaaatacacggtccaaagaataaagtgaccacagtgatgtgagcagtcaatgtggagcaggccttcaccatgcttacagaggagctattcctaactgtaacaagtattacagtgtaggagacaaccaagaggagaaaggaactcagagaaagaaagccactatctgcaactattagtaggctgacaacataagtgtctatgcaggctaacttggtcactagaggaaggtcacagaaaaaaactatctaccttattaggaccacaaaatggcagattaacagtgaatgccaactggctggtggtatggatgaagcccacaaaccaggaaatgaggaagagcacaacacatacacagcagctcatgattgtcatgtagtggggaggtttgcatatagcaacataacggtcataggccatggaaactaggagcaccatttcactgccagtgaagagatgaacaaagaaaatctgggccaggcgggcatcaaaagaaatagtcttgtgctcaaccagaaagtctgcaatcattttaggggtagcagaagaggcaacacatacgtctataaatgacaggttggcaagcagaaagtacatgggggtgtgaaggcgggaatctgaggtcacagtgaggatgatgagaaagttgcccaacagaattgctagataaagtagtgaaaatataagaaacaagaaaggttggagctcccttgaactagacagtcccagcaacacaaattctgtcacccaagaatgatttgtctcattcattgaattttggaagggacttaatttcagctacatgaataggagagaaacagagatcagttaatgaagtgagcatgggtttggttttctaattacacttaaacttttcagaattccaattcctattcctatgtatgtgtctgggttttcatgagttattacaagttatacagctaagtgtggaagattgggttaaaggggagagttgtcaaggagatgttcaaccaactgggatatctaaatacattaatttaagaaataaaatcgacaatttaaaaatgaatttgagcatctgaagtttttgtgacactacagaaatcccgtctaaaagtctacagagacaaaatctaaaccaatttttctaaagtaaatgatagtaaaaattttttgaacatctgccacagaggaagataatttcacaaacttgatgactaaaaaagttagacacaaaagagtatacactgtattggtctatttaaatgaagttcaaaaatggcaaaactaaggtgtagaaaaacctcatagcagttatccttaagggacaggaagtggtcatgggaggggtttctgaagtgctggtaatattctttcttgatgtggttgatagttacatgggagtgtttactttatgaaaacttactgaaatatgaacttttgcttttttctcttttgtatacatacgttgcataattatgaaaattaaaatagaaagagagacagcattagatttgtgtaagagagctcacaggagaaatcattgccttaagtgattatatcttatttcttctctacagttaaacattatgtaaacgaaagtacagaaccctggcaaaattgaaaggccccaatattattggaactcttttatgattcagcttttcatggagttctactttatcatgaaatctagcacactggttcctttcaattaatccctgaaggtatgaagcgtctttaaacttagccattggtgttactaaccatagacagtttattgagctatgattgatatttcatttgatgtgacgtggcttaaaaacgtataagttatattgcttactataaatactaatataactaataagttatattacttattactaaggaaatcagaccagaaaaaaaagatttttcttttctactcagttactctatattctatgttatcagaactttcttccttttatgttatttttatttgtagaagctatttagaacttagaaaagttttatggtaaataagaaaaaataaaatgtgaattttaaaggagcattacattatctgattttgaagaatctttctctacatcttaatcaggtcttgggagaggatgtcttttattttactcatttctaaccacttgcaatttttgatattaatgtcttcttagatcatagctgcaaattgctaagtctctctttgggttagactggagggtttatttataagaacagaacgtgtgataaataattttaactcccagaaaccaaatttagactcacctctgtatttcaaatctccaattctcccaaaaaaatacaaattttctcccttatttgcaaatgatgtgttccaagacctccagtggatgcttgaaaccactgatagtactgattcctatataagctatatttttcctatacatgcatacctaaaataaagtttaatttataaattgggcacagtgagagatgaacagtaataactaacaataaaataaaaaagtataacaagatactgaaatagcatttatgtgaatgtgtttctttttttcctctctctcgctctcaaaataggttaatatttttggaccacagttgacctgaggtaactgaaactgctgaaaacaaaaccatggataagggagaactcttgtattatcacagattatatcaaaactatggctctaggctttttagaagagtttaacaagtggagcttgaaggtaaggcaggctaccgaaaaaaattatacaaatctctctttcttctcacttcccagaagtcctgacccttcaatcctgtgacgtaaatactgcattgaatccctaaggcatgaatagaagtaaaatctaacaaaatcagtgaataggagttcataggtactccatcagaaagagcaaagcaataagcacaaggaacgagtgtcctatggagaccctccagtgctgcattagagaggggcatcaggaggcatttctgagcacagaaacttcctggtgtctttaggctaagacacataatccaactatgtgaaagacagtcataagaatcatcctcctgatagcttttctgactcttctgcagagctgtattgttccattttcattggcttcttcaggtgctcagtaaaggaaaataccctgtttttcatggagaaaacattgggcaaattgattcaatcaagaaatttcttagtatataagattaaagtggtagaacacatgaactctgaacctgtttcttacctaaatccattcttttttagttcacttactttatataaatttaaatgcctgcttttccccaggcactgtgctatgcactggtgatgaggcagttaggtttataacttgtctccctaaaaattatttgctaatattaataaccctttccttatttagacaagctgatgaattcacttccctttacccctagtacattccctattagataaaatggactgtatttttgttcccaataaaatcgctgtactgtagtgaaaacaaagctattattttaaaatgttctgtgttgtatcactgggtaactgtgtgatgctgagcagttcctttagccattcagggattattatcatcaaatattaaatcttgagactattaacctcaaagagacactaaaaatatttcttaaaagattatataaatgaaaattctttaaccaactgtactgactaagtatatgtatgcattcttagtaatgtattattttagatcagaagaagtattttctcataattttacattatgtggtctgactcacacaagaatgagtttccaataagtagatgttttatgtaaagacgttttttaaaaaaaaattcttgaaaatttgaagatggattaatgcatgtatacagggctgtgctcagcaaatctcagttccctcctattttaaattctgtcaaatgaatcttgcctcaatatttctatctcagatattatgactgatagatgaagtgaaataaataggtatcgtttacaggggccaccaaactctacaagttcaaataggtatctttcacaaacttgccaatattgctgttcccctgaacccctctcccactccaaatgcagatcagagaaatagcagtctctctattatagactatattggagacaaatgctggtgcatggtcttcagaaggatgctgacaaaacacttttacttacctaagatgaaatggaaagtgtggagctatcctataatctatagtcattaatgcttgggaagaatttcgttgttacttccacatctcctaagaaaacagaacaatccctcaggagataagtcataaagaatttacttctaaagacagaagtggattcagggtgtctgtagctgagttgtcttcaaggaggtgagacaggtctggatgctgtattttaatctaagtcttaggcaactagaggagcatttggagcagtcagaaatctgaaaggagaaaaagagtagactgaaaagaagaaatgctgaaaacaaaatcttctgcttcacaattttgcaaaggattcagcctcactggatctataaaactggagaatgttttaggaagtaccatcaataatagcgatttttatatgatttgggatctgtaaagactctgaagtagtaagatactgcattattttatcaaaaatttcatcagggaagatttagggttttcttcctttcatctgactttccctcgattcaaagtgtaggtgactttttacttgcttctgacagatatatataatcattatataactaaatcaaacatcttgtgcagtagtgatataatgaatttaccataatagtagtaatattttaaaatatattttaaggaattatacatgggatatgcttttgttcacaaatagaatatatatccagcaagaaatgttaaatttcattagtggtttatatgactactttctagtcatagattaacaaggagcattctaaactataagctttaaaaacctgaagttcaaatcaatggatgctggccaaagacattatggactatcaaaaatgtattagccatattgagtacaatgtacactacttgtgtttgtgggtgataggtgaactaaaaatcttatacttcactactatataatttatcaatgtaaccaaaaactgcttgttatcctaaaagttattgagataaaagaatatattaatttttaaaaattaaatacatgtattagcctaggatatagaaaatatattttccaattctatctttcactaaataactttataattgtaagcaaattacataccctcccaggtgctctgtgtttcctcaaaaaaagagtagaattccctctcccaaatgcagtctccggtttttgaaaaacatgatccaaactgtgtaagtcaattcaaagataagaataattataaaatattatattgaaattaaagtatatccaatcaaaagcataaaacagctggttttagtaaagtgatggcagcagtcactcttcagagttaggtattgggacaacggtaaataggtaaaatgggcatagaatattcaaagattaatttaaaacaatacggaggagaattgactgtctctggtctctgttctgttctgactcaatctctgtccctggccttaaaatatcagcacctacccaggaaaacaatattcaccaggagccattggatgagggacaaagatagagaacccatgtcttttccagacttcagtcttcaccttttacactctgcagtatcagtatactcagcacactgatataagaaaagccatcacgattattacaagctaattaggaatttgacgtcactggacggtagtgaccaagagacccagaggagagttgtgatagcagaaataccttaatcagggataattacgtgagacaatttgtttgcccacaataattatggtgcatcaccttgaggatttcacaaatggaagaagcagcaggcctaatggaaatgctttgttctgtaagagatgtaacactttttttaaaaagcaatgagtaattttgttagctaattctttatgtttccgaagagctttagaaaagcactattgggagtgtcaaaaattgatggggagtcatcatgtgactgtgcatattacacggcaaacaccttggcattttgacagcttcacaaaagccatgtgcttggtttctagggcaaggattttagagtaaaaaagtgaaagctgctttattaatacaatagagatactgtatcctacagagtagattctagtaaagagactccaaataattttgcaaacatttatacttctgagttcaaataaagaatttgagcattaatgggactctaggttcataatacaaaactcaagactctagtaccatacagtctagatgtgtcatgatcaaaactcccctgtgcacccctttacagataacctcttcccctcctcaaacacctggaaaccattcttctgttttccatgcctacagatgtgtgttttccagaacatgagacaaatgaaattgtacaatgtgtagccttttcaactgtcttctttcatttagcaatatacattcaagattcattcttgttgttgcatggattaatagctctttctttgttacatggaatagtatcccactgtatttctaccacagtttgtgtatccatttgtatattgaaggacttcttggttgctttttctctgtttttggtgattatgaataaaactgctataaacattttttgtaagtttttatgtttatgttatttttcaagtcaggtggaggatttgatttgataagaagaaatatttgattctattttaaactctgaaattaggtgcaaacagattaggattggtatgtcttcatgattgattaagccccttatatgacatgcttctctttacttttgattatattttttcttctgaaatctacagagtcagatattgatgtgactgctttagctcctttataattactatttgcattgtattgtatatctttgttcatctttttatgtttaagtagtctgtgtctttatatttaaagtggattcaaggtaggcagcaaatagttggcttttgcttgtattgttcattctagcaatgcctgccttttagtagacttcttatactatttacatataatgtaaatgatatgttgggtttatatctactaccttgctacttttttttaatttgggacttcctttactttccgtttttgtggtagaattatatcaaccatgatatgtcttgcttttgtttgacttacaaagtcttcatttcactttcattttgaaggatattttacatacttaaatgattgtgttgactgttgttttcattctgtttttttaacaattctaatcctgttttataataagtattcagttattcaaatcctggtttttcagtatatggttgttcttttatccatggctaccgtaagatattttctgtatgacaagtttcccatatgaattgtgatatgtcttcttgtgattttcttttgatttatcttgcttgaggttggtagaacttcttgactttttttattataactttcaatcaaattgagaacattttggtccccattttatcctttcctctggaactccagttacatacgtgttaggccagttggcattctcttgcatattgctgtgactctgttcagtttttcctttcacatttttgtctctgtactttggtttagagattttctattgctgtgtcttctagtttactgatcatttcctttgtggtgtctaacatttttcacctcacgaaatcttgatgttgttaatatattccattcctctcttcattctgtttatattttttatttatatacttgagcatatttatgacagctctcttaaagttattttattctaatttccacatcttggtaatttctgagcttatttgaatcagtttccaattctactcattatgatgtatatttttatgcttttttacatttatcaatggtggacgctaaaaatatttctgagtgctggattctttctttttttattcaaaagtagtagtctttgttcagtcgcaaagttacttgtgggctaggctaattatgtcattttatttttaaatattttagggtgggtttagagtaggcttctctaagctactttagccttagtattaaggaattatctggtatttaaggaattgcccagggtcgactaaggtcttgggtatttttattttattttattttattttattttattttattttttagtttattttatattttattttattttatttatttatatgttatgttatgttatgttatgttatgttatgttatgttatgttattttttattgagatggagttttcactcttgttgcccaggctggagtgcaatggcatgatctcggctcaccgcaacctccacctcccaggttcaacccattctcctgcctcagcctcccaagtagctgggattacaggcatcttccaccaagcctggataattttgtatttttagtagagatggggtttctttatgttggtcatgctggtctcgaactcccgatctcaggtaatccatccgcctcggcctcccaaagtgctaggattataggcatgagccaccgcacccggccagtcttgggtatttttaaaagactgtcttctctggctgatcagacatcatacgtctcctgagtaaactcacacagttcagcttatagctctacaaaattttttcttgattttagaagatttagcctttgtgtattcatcttactattcaataaacaactcaagtgggccccatagaaacttctgaagagtttttctgttttgttgttgttgttgttgttgttgtcgtcctggatgtagattttggccatcgccagctctctgaactccattttctgtttctaactcatcaggtcaactgtactctgctttgaattgcctttgctgccctgaaatgtagaaagtacctccaaggaggaaactaggttgatcataatattaatcttatattttattctctcaaggatcttagtcttgtgttgcatgtagactaatgcttaaacacaatgtagtggtatattttatccagttttcttgttgattatgaagggaaattaaatccagtagtacctcatggctggaagtggaagttcatactgttttctttttttttttttttttttttttttttttgagacgagtctggctctgttgcccaggctggagtgcagtggcgcaatctcggctcactgcaagctccgcctcccgggttcacgccattctcctgcctcagcctcccgagtagctgggactacaggcgcccgccactacgcctggctaattttttgtatttttagtagagacagggtttcaccatgttagacaggatggtctcgatctccggacctcgtgatccgcccgcctcggcctcccaaagtgctgggattacaggcgtgagccaccgcgcccggccactgttttcttttaaagaaaaaaatcatgaatattgtttacttctcttttaaaatgatttataattcatttaccatgaaatttatccttttaaagtgtacaattcagtaaattttatcatgttaacaaggttatgcagctatcactactgtctaactctaaaacattttccacaaccccaaaagaaaccctgcaaccattagcatttacttcccattctccctaaatgcagcctttggataccattaaactattttctgactctttggaattgcctattctggacatttctaataagtgacatgacataataataatgtgtctttccttaacttggcatattgtttttaagtttcatccatgttatggcatgtatgaatgctgtattccctcttatagctatgtaatattccattgtaaggatatagaaattttgtttattcattcatcagttgatgggaatttaggttgttttcagttttgattgtcgatagtactgctgctatgaatacttgtatacaagtttttggataaacatcttatttctctgaaatggaataaaaacctatgaaccctgactagaattggaatttctggggcatatgtttcactttttggggaactaccaaacagatttccagagtggctataccaatttacattcttacaagcaatagatgaggaatttaatttcttgacaattttgacagcatttgttatcttccattttttaaattacttacagctatcctaatggttgtgaattggtatatcattatagtttaaatttccattttattaatgactaatggtgttgagcaatattatgtggttaaggttatgtgcgtgtcttgtttggagaaaagtctattcaaatccattgcccatttttaagtaggttatttgtctttagttattatttttgagagttctttatatattctggatacaagacccatgtcagacataacttcacaatttttcatttggtgagttttctttgaactctctagattgtgtcatttaaacctcaacagtttttaattttgataaaattaaatatctatttttctttgattacttgtgtttcaggtgtcaaatcagagaaattattacctaatccaaagtcacaaagatttacatatgttttgttatgctgtgttttcattttcattttaaagcattttataatttgccttgtaattctttctttggtccaatgcatattaggaatatgttgttgaacttccactatttgttaatttttcaagttttattgtgttactgatctctaatttgattccattgtaatcagaaaacatagtttgcatgattctaatccttttaaatttagtgagacttggtttagggcctaatacatggtctatcctggagaatgttccatgtgcacttgaggaaactgtattctactgttgtttggtggagtgttttataaatacattaagtctaggtgacttacagagtttttcaagtcttttatttccttgctgatcttcttagtgttctacttaaaagtattaaaatttttgtctattattgtgaaactgtctatttctcccttgaattacgtaagtttttgctttatgtattttaggactctgttgccatttaatgaaataaataaacacatacacacatgtgtacaaaattgtttaatcttcttgatgggtttatgcttgtatcattacacaatgtccttctctctctattaaactatcacaaggacaaaaaaccaaacaccgcatgttctcactcataggtgggaattgaacaatgagaacacatggacacaggaaggggaacatcacacaccggggcctgttgtggggtggggggaggggggagggatagcattaggagatacacctaatgttaaatgatgagttaatgggtgcagcacaccaacatggcacatgtatacatatttaacctgcacgttgtgcacatgtaccctaaaactgaaagtattatatatatatatatatatatatatatataaaaagatgttttgttataaagtccattttatctgatgttgatatatccactccaagtctcttttgcttatggctgttggcatactgtatatttttttcatgaatcttctgtcaacctatttgtatgtttgaatcaaaagtgaattttttataggcgtcatatagataagtcatgttttcaatccattctgcttatatctgccttttaattgaagtatttaatctagtcattaataataaggtagggcatctgctactctgttatttgtttctatatgtcttgtatcttttctgtttctctttcttattatagtcttctttcatgttaaacgtatgtttgctagtatatcattttaattatcttgtattagtggtttccctggggcttagaattatcaccttaacttataacaatcaagtttggattaatatctatttaatttcaataatatttttaaaactttgcttccatatagctctgtttttaccctttctccgggctgttattgtcatacaaattacatctttatacatgttgtgctgaacaacaagtggatttgtaggtgtttctttgtgaagttatcttctaaatcaggtaggagaaaaaagtattacaaatagaatatatatttatgtattttacatttacatatgcatttacctttattagtcctctttatttcttcatatgtattcaagttactgtctaggacttttacttcaacctaacgggctctttttagtatttactgttaagaaccaaactacttttctttaataaatgttccctgggttgctgtaagcctttccttaatctccgggatatggaaacagtggccctgtaaatttttgtcaatttttcatttctttatggaagagggattttagattagctccttactttatcatttttggtggcataacactctattttgtagggtgttttttcttttaccatttttactggatatatattcagtggaaaataaatcattctaccaaaaacacacatggacttgtatgctcatcactgcactattcacaatagcaaagacatggaatcaacccagatgtccatcagtggtataatagtttggatttataaaaatggtaaatatacaccatggaatactatgcagctataaaaaagaataaaatcatgttgtttgcagcaacatgggtagagctgaaggccataatcctaagcaaattaactcaggaacagaaaaccaagtactgcatgttcttacttataactacgagttaaacattgagctcatacaaatataaatatggtaacaatagacactgtggactactagagggtgaaaagggagcttggtttaaaaaccaccaatcaggtactatgctcactacctgtgagatccatactcagtatgtgaggtttggagtatggatcccatcgcatgtgtgagcatcacacaagattcccctgtaacaaatctacacatttatcccctgtatctaaaataaaagttgaaaaggaaaaaaaatttccagggattttgatgatcagatgaatctgataaccactcagctagttggcctctaaagtccttttgaattagatgtgctgtaaacctcacctcctcacctcatgtgctgtgaacctcacctccttctactttatgtttacatttttggcttttttgttaaaattatttttgccttgagcgttgatatttcaaataagtggagtagataacagtgtcattcctagatagcattgtgtgcttatggctgatattaaacttttcagccatatatactttttatattctttatgaaagttttctttacaacaataattattatttttaaacagtttttgcacctattgaagtaactatatatatattatatatacagtttttcttttattctgttaatacagtgaattgtattaaattattatcaaatgttcattcagttcatcatcaacattgcattgctgtgtgatctcaaatggatactattttattattctgttttcctgaatttgtattgctctgtgtttaaaggaattttgtatttttgtttttgagcgagattggcctataatttttccttcttgtatgacccttttcaagttttgaagtcagaattattctagctcattatgtgagcgaagcaacgttttctcagaacgaggaaacaatgtcagtctgtttcagatgacactttattaattttttaattttcattttcagtttttgtgggtagatagtaggtgttcagaagacactcttgcactgagaaaatcaacagtttattttctccttatgacttgctttacccatttcttcatgaggctatattttctacagttcatcatttccaatgtacatatatatatatgcatttaattttatgttacagaattagggaagaaattattcaagatagactcctagaaatacaattatcagctcgtgagtacggacataatttgataaatacagcaaattgctttctaaaagttgttcagtaatttttgaccaaatagagcttccatgttttcaaatttttttgtcttatttagtaatatccttttgttttactctttattaatctaataggggtccatttttattatctattagatcaatttttttgctacgtttgttttctatttgtatatctttagaaaatattctcataatatttgactcacaaaactttataggtaataaaataagtctgacagagagggttaagttctaaaaacatgtataatgggtaagagaacatatgtgaatgtatgatgagattgatttagttatcttgcagtgatatgtaaccaataattaccttattatccttacaatactataaagtagatattattataatcctaactttgtgttagaagcagctacaatttagtgctaaagttagcgtcacaaggcacactggtagtctgaaggtttgaatgcacaaagaacatacgtttaactgctatatattgcttaaataaggatctgattacggaaaacctctatctaaggatgtctacctggtctttaaaataaatttttattagtattattattattttaagagacagggtcttgctctgtcactcaggctgtagtgcaactatgtgatcatggctcacagcagccttgacctcctggcctcaagtgatcctcctacctctaaaataacaaagttgtgcccaattatattctctgctctttctgaagtatacatcagcatgctcacttttatcttgctacttcaatcccatgcttgtgttagcagtaacaataatcagtcataattcactattttgttttatattaggctctcacacccaaaccccaagtcctcatgctcaaaaacccaggttgccttgatttggtaataattttagcccagaatccctttatctctctgaatggcaacatgtatagtagcttttaagcttgatgcgattaaattccacataccaattttgagataaatctcaggaaagtaataaagggtgaagaggagaagcttccaaaactttttaaaaaataatttaaaaaagggaatcacaggagtctataaaggaactatttaaatatcatgatactccccaaagtctcagatagccaatctcatgaattgcaaaagccaattaaaaaacgaacttcgttaagtgaattcatcttgctatggtagttattaacactattttggttgcttctcccccatatcaagatggtaagaacttttaaattgtttgcccataattgcaaatgagaacatatgtcatgagacagaaatgtggtgaccccaaggtttgcaacaactacatttaccctcatttaatgttctgcctctatgctttctttgtccttatctaaagtgactgtgccagtaagcactagcacacatgcacagggcctgaagaaaactagatccaaagaaatgtaaatccagcaatgggtctaagaaaattagaattttgttttctctaatcttatacttcttccttttcttgaaaatttttatgtccaaggttttcaaattccatacaacacaatattttgccaaaattatccaatattttaattatcactacacagtacttgatcatacaacagacataagtgggtaaaactgcccagatataaaaatagcttgctttgggatgttatggaaacatatcccattagagctgcagaaagacttaggaaatctacagagaagagcaggcgacaaagacaaaagtaaatgttgtggcacagagtgagtgcccaggaaatttgatgagcttaattgaggaaaggagcccaatcgttagcccagactgatagaccacatttcttcttcacatcttctaattttcacaggcatttcagttcttctgtttccaaatctagtcctcctttagtctcccttaaccagggtaacagcatttgtattcccgcagtggcttcagccagaaacttctctccttccattttcttactcccacttccatcaaagctttctattacagtttcccttgtctaaaccttccctttctttctccttaaacgtttcgaagggcttctaataatctccaactctctgcactgatttttttccagtcaatttctcctgaatgctcagagcagtctttaaaaataagataaatctttaaaaataagataaataagtcaaacaactttaaaatgataaacatgcagtcattcctctgtatacatgggttctgtgtctatggattcaatcaatcacagatcaaaagtatttagaaaaaaacaattccacaaatcttcaaaatcaaaactgaaatttgcaacacaccaagtactacattgaattcacttaaacgaagtgatatgtagacattgtattagatattataagtaatttagagatgatttaaaagtatatgggagaatgtgcataggttatatgcaaatgctacaccactttataccagggactgaagcatccatgggttttggtatctgcgggcatcttggaaccaattccccatagacaccaagggaccatcatagtccccattgctctagaaatataatccagtctccataatgagcccttgatatcctgtattttacatattaaccttcagcttcatctcttctcactcattggtcattcactaaagtcctgctttcattttctgaaacacataatccatttccacttcagggagtttccatttctctcttgtctgcctgaatattgtttccttcggctcttctattgtatatccttctcactggaactaaataaaagattattcattacacagagcagagagaggctttttctgagcaccattccaccctcttcactcctttgttttttctcatctcacattatttactaccttcgtaacactcattaaacttttaatttgctcgtttgattttcttacatgtttttgtttctctctccttcctgcatctccactccaagactgtgggactcgtggggaaaaactgagtgtcttaggatcactatcatcaccccaacacctggcccagaacctagcaaatagtagatgcccacagaatattattgattcactgaataaatgagtgtacaagcggctgcgaggtggttactttttacctttcaaaaataccataaaactcttttttttaaaaaatgagaatgttataatggggtcatacatatgtttttattgacactggcttcttttactcaacataatgcctttgagattcaccccagttactctgtgaatcaatcgttggttcctttaaattgatgagtggtattctgcactgactctggacttggccatgtgtcttgttctgctgaaaggaataatagcacaagagagttttgcattgggactgccctctattgttactattggaatactgaggccaccatggaattgagcctaagccagtcttttggaagacaagaagcaatgatgtcctggtaaatgtttaggagctggttcttggggtaagggggcagagaaggctctgatttgtagtattttccaatgtctgtggtacaaatactcccactatggcagatttcaagccaccaagtgtataataactacctcacaaaacccctgataatgtaaaacaagctctcattcaggtataagtcacctccagctgatgacagatgagagaccatgtagagagaatttggggcctggctgacagtaaaccagctcatgttgctaacctggaggctaccagacatatgagggttgtcagtatagattttccagctcacccagacttaccagatatcctagtagagatcaaacatcttggcccagaccagaaaaggtactcatctggtttgtgaacaaatataaaatggttcctagtttaattcaatacattttgaggtggcttaatatggagcaaaatctaataaatacaattggctatcatttcattccatatcacctatgggtatcttgaatattataaataaacaaatgataagcagtttctgaaaaaaaatgagtctgcaagtcaccacgaaaagtagtaaaatttttgttttactgagataagtggctacgttgttgtcatattgctagtgtaccgctaggttcatgtggaactcgaattattttttttaaacagtgaaaatacaggttgtaataccaggagtaaaaataaactgtcgatgctagcatcccatccttgttgatgttgcatttttttcttttcattatatgttgttgtgactattgttatagaaaatttcacacaactgtcctctaataaactgtatgttaatactagtggtcagtgttgagaaccagacccaaaactgaaaccaaatatttgaaatacaaagatttagagatgttctgctccttttcttttaagaaaaaacagaatttaaatcatcctggtggcacaataggagctgagctaattttttaaattgaattttaatgccggataatttgcatagaaatgaaccgaaatagaccactcagaattaggtcccttcttgtacagttggacagtaaggagatttcaccattatggacctatgtaatgataaggggaaggaagcacagaaaacagtcttgatgatcattctcacaccctagaacaagatatttggattttcttcttgacatgggctcttaggatatgtatatatgtactgtataaattcatttctactttgtaaaaccaaacccattcccattagtatgaattccttcaactttctctctgaagtatctaactttcttaacacatcgtctcccaactataaattcatctcttcccatttataccctaaactcttgaaatcaactattacatcatgtcagttgtccccaggtcatcatttcccattgatttctcttgaagttttctttagttgtttgtttcattctccacccttttctattctaggcccctgttggctcattatcatggctacattatctgggcttttctgcctctagcctttattgagattggagaataaaaggagctggcaggagattagagggaaaaaggagagaaaggtctggattttactcagtttctcctccctgccacttcactagaattcttctagtaatctatccttgagtatttataccttgtaggtccctttatggctctagctctcaacaatttctgaccatctacttgtctctccaggccaagagtaataaagcttcctgctggttctggtgttaggatgcctcatttaatcctgccaagatttttatagatagttgattctcatattatgttgaaaacctttgccaaataggttttatgttttcttctgtggccttgactaatacacttcttgacccattgtaatgggtctgcttcttgctcaacacttacaaaaatgtgacccaccaagctatttcactaaataaatggcttctggttttagggggaattttgtcattctcctgtgagaaggtgttaaaggtacttttttttttaatagcatgctttttttttctgtatatttttctatatattcaattacctactgagcatctccacttgttttcatatgcacacttcaaattcattatggacaatattcaacttatctttcccttatgtaacaattcataaagacattttttaaatgaatgaactcctggagttgtgtattgtcttgctagctcctcaagcaagaaaattttacaccaattttgtttctcccttacagtcaaatgtagtcaagtaataggcattatctatataatattacctatgtaacaaacccgcacatgtacctctgaacttaaaataaaagttattaaaaaaaagaaatgctgctgatatttttggttgatgctgtatcctgcaactttactgaatttatttatcacttcttagagctttttggttgaacctttatataaaatctatgtataaaatcatgaaatagaaacaatttgacttccttctttctgaatagatcctttttatttatttttcttgcctaatttctctggctaggactttagtactacgttgaataaaagtggtgaaaattggcatctatgtcttgtttcagatcttagaggaaaagctttcaacttttctccagttagctgtagtttatcatttttggcctttattgtgttgaggtacattttgttgagagttttaatcaaacagcattgttgaatattgtcaaatactttttctgtttatcaaagtgatagattagcttgtgtccttgatcctgctaatgtgctatatcacatttattgtattatgtaggttgtattatctagaatgaatcccatttgatcatggtgaatgatctttttaatgtgctgttgaatttggtttgctagtattttcttaaggatttttgcatctatttttatcagagatattgtcctgtcatttcatattttgttgtgtccttgactggtttttgtatcagttatgccagcattgtagaatgagtttggacgaattctctcatcttcaattattttgaaatagtttgaaaagtatcgataacatcttttaaatgtttggtagatttcagtagtgaagccatcatatctggagcttttctttgatgggagactttttattatagattctatgttgttgctcactattggtctcttcagattttctactttttcataattcaattttggtaggttgtatatgtatatgttggcatgtagttgttcataatagtctcttataatcctttgtattgctgttacatcagttgtaatgtatacttttttatttctgattgtatttgaaccttccatctacttttctaagttaatctaattaaaggtttgtttctgttcaaggatttctgtattgttttagtcactattccacttatatccactctcatttatttcttttttctactaattttgtgtttgttcttgttgttctagttccttgaggtatgaggttagactgtttatttgagattttttgtattttatggtgtaggtgtttattgctgtaaacttccctcttggaactgcttttgctgtattccataagttttcatatactgtgtttccaatttcatttgtctcatgaagtgtttgaattttctttttaacttattcattaatccatttgttatagaggagtatgttgttaaatttacatgtatttaaatggtttctaaagtttttactgttagtgatttctagttttattccatcatggtcaaaagagatacttgattttgatttttacagatttgctgagatttgttttgtggcctaacatctgatctaccctgaagacacttccatgtgctgatgaggagaatgcatactcttcagctgttgagtgggatgttctgtgtatatctggtaggtccacatgatctagagtgcgctttatatttgttgttttttttttgctgaatttttgtctagatgatctgtcctttgccaaaagtgagatatcgaagtcctctgttattattgcgttagagtctatctctccctttacatctaataatatttgctttatatgcctgggtgttctggtttgagattcatatatatttgtagttgttatatccccttactgaattgacccgttcatcatatcatgaccatctttgtctcttttcacagtttttgacttaaagtctattttatctgatctaagtatagctacttttgctctcttttgatttccatttgcatggcatatagttttctcttctttatttttagtcaatatgtgtccttacaggtgaagtaagtctcctgtaagcagtatatagttgtatgtttttaaaatgcattcagccatcttttaattacagaatttaatacacttatattgaaggttattattaatagttatggatttactgttgcgattttgttcattgttttctggttattttgtaggtctttgtttctttcttcctctcttctgtttgcttttgtggtttcatggttttattccattctctttttcatttgcatatatgctgtaacttttttcttttttgttactctggggcttacataacaaatcttatagttctaaaggtttattttaagctaataacaatttaactgattgcctgcaaatattctagacttttaccctccaacccaatttataattttcttgtcttaattcacatcttttatatggtttatttctaaaaaacttattgtagctatggttattgttgaccattttgacttttaaccttcatactgtataccaccactacaatactgtagcactctgaatttaattatgagtttacttctaccagtgagtttaaatactttcatggtagtaattaacatcctttcacctcatggtggcaattaacatcctttgaaaccgtcttttaagcatttcttgtacagctgttctagtggtgatgaattccatcagcttttgcttgtctgggaaagactttgcttctccttcatatttaaagaataactttgatgagtatactgttcttgactagaagtttttttttttctctcagcactttgaatatattatcccattctttcctggcctgcaaggttgagaaatattctgagaaatatgctgatagtccaagcagcaagataacagccatgaagtcccatatagggggatttcctcataagaaaatgtcttaggctgcaggagtttgtgaggctgctgtgctagcttgggtacagcctcatcactgggcatgagtgcctgttccttggggaacagggtgccacatgggctcaggtgctaaggttacagctgttgtgctggtcctcggctctgagtagatggagccaagataccgcagtcactgggatggaaagatggagtgccttcttggcagtttgtttccatggggttagaagttgtagctgctcagctgcagaatggtgcgctaccatgagtaggtgtggtgtagtggcagtgaagcctaggatatgggaagatagagtggctactggcccccaaatgagaaggcaccctagcagtggcttcagtctcaagatgtcattacactgcagcagcttcgataatagggcaggatgagacataatgtgagctccttgtttggagtaacatagacatgtgaactccaggcaactcctcaggctgggcctaggacctgtaaggactacagtgatctccaggagcaaagattgtgggtgtccacattttaatttgtgttgctaagggcctcctgcataccttttctctgtaaggagagtctgccctggctctgacctcatcccactaggagagaaaagatggtaaaggcagagtgttccattcccttttttatatggccatcctgagtctccgtgatccacatggtctctgccatttccttgttgtactccagggctctctttcatatattttagttgaaatgtggttatttatttgtttctttggtccttttgtgtggtggccggggaggaggttgagtgttaggaacttctagtcagctatcttattggtgtcacttcctcttgcatcttcttgatttaagatttatttaggatcccagagtcttctgcatcctcttggcagacaaaggactaaagagttaaggcagacttcattattactatgttagtcaaattatttctttttgttgataagaatatgatattttgttggtaagaataggacatatggccttgcttagaagaaaggtgactaagaattgtagttctggaaggggagctattttccagtaacagctctacactctagaagaagatataagaaaattgatgaatacttagttccctgtaatttactctgtctcctataatctgagattttaatttctccagtgcagtgtttatctgattatcctttgtagataatttcctttgtaagtaaagttctgtactagggagaacttcacttttcttctttgtctactaacatacttcaggcctcagatttgtcttacctgctcttaagtctttatcaaagcaatttagactctatagctatttgtttaacctaccttttccactaggactgggagatttttcatttttctcatcattaaattcccagtagttagcagaaattctggatagaataaaaactttattaatatttgttgaagaaattcatacatcacttaagcctgttctttacgcatttaatttttagtaaactctttactgaggtgtaacagaaacataaaaaatcacaaatcataagtgtatgtatagtttgatgaatgatgaatcaccattgtattagtttcctacagtaacaaattactgcacacttggtggctcataagaacagaaacatattttctcttagttatggaggacagaaattcaaaatcagtatcactggatcaaaatcaagatgttaacagggccacacttctttcagaaactctggagaaaaatctgtttcttgccatttccagcttctggtgtccgtgaggattccttggctattggccacatcactctcacatcttcaaatctctttgctccaactttatatcaatctaccactttatgtataaggtctctcttagccttcctcttacacagatacatgtgattgaattttaggcccagctagataatccaggatgatctccagatttcaagattcataaattaagcacatcaacaaataccccttttttcaaatataaggtaaaatttataaatttcaggaatgaagacatgaataccttttgggagactaccataccttcacatgaactcagccacatgactatttaatagattgatctaaagaacattaccagcccctaagttattcttccttttaaactttctatcagtttttgactttgttaactgaagagtaattagtcccctgacttctaacaaaatggattacatttgccattttagaatttatataaagtaatacagtttgttttaactattgtctgactttttgctcagcatacatctatgttttggtgtacaattatagttcttttattctcgttgttatatggtaatctattttattaatataccaatatttagtctattgttgggcatatggcttgtattacagttctgctactaatagaactgctatgaatatttcatacatgccttttagtatatattgtatgttggacatacaactaggagaaaattagtagaattagtgtgtggtagagtagtatatgtgtgttcacttttggtatattcttccagctttccaaaacgattgtataaatgcatgtttcagtaatagtctgtgagagtttctgttgctccacatcctaattaacatctaggagagtattactttttcagtttagccattctgatgtatataaataaatattgcattaaaattcaatacgtatatgaataattattaatacagttaagcaaactttcatatgcttattgagcatttgaatatctccttttgtaaagggcttatcaagtttttgcccatttatccattagtctgcttttttcttactgatttatgagcagacttttagtattttcaatataaagtttaaaaggaggaatatcttgggggctgcttatatgcttagtaaatttctttttccaaattatgagctgcattttcactctcataatgtctttaatgatgattatgtattttaatgaagtctagcttgtcattttttcttttaagtttaaaataatttgtcatatttaagaaatccttgcatatacaaaagtcatgaaaacattctcctatgtctcctatatcatcttctaaaagctttatttttatttatatagagatatatattattctgaattatttttgtgaattttgtgaatttagagccaagcttttttgtagttgtttgttcaaggtaggagtataattgccaagcatcatatttttgtttcttctcttcattatcctatttctcatagatcaggtaactatatactttctttttgttcccagaatctctaatgtgtttcactagcatgtttcttttttctttaccaatacaagatttcaatatatagtcttttgtttaacttttatttttatttcaggggtatacgtgcaggtttgttttataggtaaattatatgtcacagatgtttgttatacagattactctgttacccaggtaataagcatagtactcaataggtggtttttggattttcccccttctgccacccttctctctgtagtaagccccagtgtctattgttttctttttcatgtccattcctactcaatgtttagctcccacttacgagtgactacatgtggtatttggtttttttgtttctgtttctgtgtgtctttgcttaggataatggccttcagcttcatctatgctgctgcaaaggacatgatatcattcttttttatggctgcattgtattccatggtgtatatgtatcttgttttcttcatacagtctactatttatgggcatctaggttaattccatgtctttggaaatgcaaagaggcaagaatagtcaagaaagtttcaaaggatgacatagtctaccatatatgaagacttcttgtgtcttttttcaaaatttgaagaaagtcttgatatatgcagtgtatgcctgccttcagaatttctttggatattcttacctctttgtatttgcatataaattttagaatcagcttgtcaattagctcaaatatattattagaaatttgattgagattgcattaaatctatggatcaatttgggaaaaattaaccattatcaaacaacattgctaaatgcactagttaaccttaatagcttaaaatattttctacatatatacagacatacagaaatgtgtattatatatatacagaaaaaaatgtttttctaaaattatattcaactctttcagttatttttaaatacacaatgaattatagttaactatagtcaccctattgtgttaccgaatactagactttattccttctaactgtatttttgtacccattaaccatatcctctttatatctccctccccactacccttcctaatctccagtagccatcattctactttctctctctatgagttcaattttttttagctgagatatgagtgagaaatatgagtgagaacatgtgatagttgtcttttcatgcctgatttacttcacttaacatgatgtcctccagttccatccatgctttgcaaataacaggattttatcatttgtatagctgaaaaatatttcactgtgtatgtgcaccacagtttaattatccgttcatccattgatagacactttggttgattccatatttggctattgtgaatagtgctgaaataaacatgagagagcagatatctcttcaatatactgatttcctttcttttggatatagacccaggaatgagccatctcggctcactgcaagctctgcctccggggttcacgccactctcctgcctcagcctcccgagcagctgggactgcaagcacccgccaccacgcccggctaagtttttgtatttttagtagagacagggtttcaccatgttagccaggatggtctcaatctcctgacctcgtgatccgcctgtctcggcctcccaaagtgctgggattacaggcgtgagccggaaaaaagatctcgtatacactatcggtgggaaaataaactagcacagccactatgaagaacaatacagagttgcctttaaaaaccaaaccaaaagaaaacaaaaaaactacaaatagaactacatatgatccatctatcccactactgggcatttatccaaaggaaagaaaatcagtatatcaaagagacatttgtagcctcatatttattgcagcactattcacaataaccaagacgtggaatgcacccatgtctgacagcagatgaagagatttttttaatgcagtacaaatatacaatggaatattactcagctataaaaataacaatcatgttatttgcaacaacatgtatgagactggggtacgttatgttaagtgaaataaagcaggaacaaaaagctgttcatcacatgttctcattcttatgtggaaattttaaaaagttaatcttggccaggcgcggtggctcacgcctgtaatcccagcactttgggaggccgaagcaggtggatcacctgtcaggagtttgagaccagcctggctgacatggcgaaactctgtctctactaaaaatacaaaaattagccgggcatggttgcaggtgcctgcgttcccagctattccgggaggctgaggcaggagaatcgcttgaaccctggaggcagaggttgcagtgagcagagatcgtgctattgcactccagcctacacaacagggcgagattccgtctcaaaacaaaacaaaacaaaaacttgatcttacagaaggaaaaagcagaatagagattactagaggctgaaaaatgtagagaaaaaaggagaaaggagacatttgttaaaggacacaaaatcacagctagattagagacataagttcttatgttttatagcactgtaggatgactatagccaaaaataatattttttatattttcaaatagctagaagaaaagatatcaaatattcccaacaaaaaatgataaatgtttgaaatgatgggtatgctaactaccctgatctgatctctacatattatatgtatcacatcactatgtaccacataaatatgtagaattattgtcaattaaaaataaacttaagaatataagaacacaaagaaaatcaattatactaaactgtggtattcaaatattttttcaatggtgatatagtaatacaagtgctttctgaacacactgaataagatctagtgagaatctaatagctaaaccaattttaaaatagtaatgttccataaacagaactaaaaacaaaaaccacatgattatctcaatagatgcagaaaaggctttcaataaaagtcagcattccttcatgataaaaacactgaacagactagactttgaaggaacatacctcaaaatattgagccatatatgacaaacccacagccaacattatactgagttggcaaaagctggaagcattccacttgaaaactggcacaagacaaggatgccctctctcaccactcctattcaacataatattggaagttctggccagggcagttaggcaagagaaagaaatacagggcattcagataggaagagtggaagtcaaactatccttacttgcagatgacatgatccggtatctggaaaacctcatagtctcagcccaaaagactcttaagctgataaacgactttagcaaagtcttgggatacaaaatcaatgttcagaaatcactagtattcctatacatgaacaacagtcaggctgagagccaaatcaggaatgaaattccattcgcaattgtcacaaaaagaataaaatacctaggaataaagctaactagggaggtgaaatatttttacaaggagaactacaaaacactgctcaaagaaaccagagatgacacaaacaaatggaaaaatactccatgctcatggataggaagaatctatatctttaaaagggccatactgcccaacgcaatttatagatacagtgctatttccatcaaactaccattgacattcttcacagaactagagaaaactattttaaaattcatatagaaccataaaagagactgaataatcaaggcaatcctaagcaaaagtaacaaagatgatggcatcatgctccctgaattcaaactatattacagggctacagtaaccaaaacagtttggtaatggcacaaaaatagacacatagactaagaaacagaatagagaacccagaaataagaccacacacctacaactatctgatatttgacaaacctgacaaaaacaagcaatggaaaatgaattctccattcaataaatggtgttgggataactagctagccattgtcttagtagcctagacaactgccttgtctagggagatggcagcagagatgaagagacataaattaagtcagtatatatttttaaaataggaggactatttagtggattgtatggagtagtggatgagaaaaaagggggaatcaaaattgtgaatttattaatagctaactatttatttgactgcatccatttttcctctcattctacctccaatttcttctctttgtacctcagactcatcttccttctttgatgacaagggctctaaagtgagtcacctaaactgcagtctgaggaggagtcaagggtactgcaaatgtgagagccagattcagatactggcatgtggaacaagttgaagaatggctaatctgacgttctgtatttatccagaaattttaactaggctccatgagtaaggctttgagggcacagttcagggcttagctgattccccccaaatgagctctactaccagaaattccctggtagagattatttattctccagctttagggcttttattagatgaaatgtcttacttcatgctttaattttatggttctatttttaacaatttcctgaacagtacattctaccatgtctcaaaataaacaatttgttatatttttataaatctggacaaagtctgccttgtttattaacgtgtttttaaaaaattcaatagataactattaagtcatttacttctcagttaatttatagaagacagcatttccattagtatcttttgaataggtaagagatgaaggacaaaatactttagacttttaaactatgtttattttatttaaaatcattgctgtgaaaaaaaaacaagacattgacctattgaacatagtgtattatttttccttttatgcaatcttggcatattcttcaattcaaaataagaaaccccaaaagtatataatacttctttggaaaaatatgcaaaggccaacacatacaaaggacaatgctagctacagaaatgcgtcaaagactaataataattgacaaaaatccagtattttaacaataattaataccaggtaaattgatacatcctattacagtatgaaattctgccatttaatttcaagtaagaacccttatttccattctagtacctgctgtcttatgcatgtttaacacaacaacaacaataatataagtagttagcatatattaaagcattaacgaacaccaagcattgttaaatatattacatgtatttttgcttaattttcacaacattactaatggttaaatattattaccacattttgtagggcaaaaaactgaggcttagaaacattgaaaaaaacttgctcaacgttgcaaaacaagaaatttgtgacactggaattgacatctacaagggactgatgtaactaattgctggatacatgtccctcaaagacacagaaacagatcttgtattctagtggatctccggcacccagtgagggcctgaaacagagtacatgtccaacaaataattattgaagtaaagattgacatttcaggagcagagattaatattcaaaaacaaagatgagaattttggcagaaaagtcaaaatgaggtaaaagtacatttccaccttaactttttttaatttgcttagctgacataaggaagagtttataatttgtttgttttttttaattttattattattatacttttaagttttagggtacatgtgcacaatgtgcaggtttgttacacatgtatacatgtgccatgctggtgtgctgcacccattaactcctcatttagcattaggtatatctcctaatgctatccctcccccctccccccaccccacaacagtccccagagtgtgatgttccccttcctgtgtccatgtgttctcattgttcagttctcacctatgagtgagaatatgcagtgtttggttttttgtccttgcgatagtttactgagaatgatgatttccaatttcatccatgtccctacaaaggacatgaactcatcatttttatggctgcatagtattccatggtgtatatgtgccacattttcttaatccagtctatcactgttggacatttgggttggttccaagtctttgctattgtgaatagtgccgcaataaacatatgtgtgcatgtgtctttatagcagcatgatttatagtcctttgggtatatacccagtaatgggaaggctgggtcaaatggtatttctagttctagatccctgaggaatcatcacactgacttccacaatggttgaactagtttacagtcccaccaacagtgtaaaagtgttcctatttctccacatcctctccagcatctgttgtttcctgactttttaatgattgtcattctaactggtgtgacctggtatctcattgtggttttgatttgcatttctatgatggccagcgatggtgagcattttttcatgtgttttttggctgcataaatgtcttcttttgagaagtgtctgttcatgtcctccgcccactttttgatggggttgtttgtttttttcctgtaaatttgtttgagttcattgtagattctggatattagtcctttgtcaggtgagtaggttgcaaaaattttcgcccattttgtaggttgcctgttccctctgatggtagtttcttttgctgtgcagaagctctttagtttaattagatcccagaaaccaacgagaacagagacacaacataccagaatctctgggacacattcaaagcagtgtgtagagggaaatttatagtactaaatgcccacaagagaaagcaggaaagatccaaaattgacaccctaacatcacaattaaaagaattagaaaagcaagagcaaatacattcaaaagctagcagaaggcaagaaataactaaaatcagagcagaactgaaggaaatagagacacaaaaagcccttcaaaaaattaatgaatccaggagctggttttttgaaggatcaacaaaattgatagaccaccagcaagactaataagaaaagagagaagaatcaaatagacgcaatacaaaatggtgaagggaatatcaccaccgatcccacagacatacaaactaccatcagagaatactacaaacacgtctatgcaaataaactagaaaatctagaagaaatggataaattcctcaacacatacatcacccccaagactaaaccaggaagacgatgaatctctgaatagaccaataacaggctctgaaattgtggcaataatcaatagcttaccaaccaaaaagagtccaggaccagatggattcacagctgaattctaccagaggtacaaggaggaactggtaccattccttctgaaactattccaatcaatagaaaaagagggaatcctccctaactcattttatgaggccagcatcatcctgataccaaagtctggcagagacacatccaaaaaagggaattttagatcaatatccttgatgaacattgatgcaaaaatcctcaataaaatactggcaaatcgaatccagcagcacatcaaaaagcttatccaccatgatcaagtgggcttcatccctgggatgcaaggctggttcaatatacacaaatcaataaatgtaatccagcatataaacagaaccaaagacaaaaaccacatgattacctcaacagatgcagaaaaggcctttgacaaaattcaacaacgcttcatgctaaaaactctcaataaattaggtattgatgggatgtatctcaaaataataagagctatctatgacaaacccacagccaatatcatactgaatgggcaaaaactggaagcattccctttgaaaactggcacaagacagggatgccctctctcaccactcctattcaacatagtgttggaaattctggccagggcaattaggcaggagaaggaaataaagggtattcaattaggaaaagaggaagtcaaattgtccctgtttgcagatgacatgatggtatatctagaaaaccccattgtctcagaacaaaatctccttaagctgataagcaacttcagcaaagtctcaggatacaaaatcaatgtacaaaaatcacaagcattcttatacaccaataacagacaaacagccaaatcatgagtgaactcccattcacaattgcttcaaagagaataaaatatctgggaatccaacttacaagggacgtgaaggacctcttcgaggagaactacaaaccactgctcaaggaaataaaggaggatacaaacaaatggaagaacattccatgctcatggctaggaagaatcaatatcttgaaaatggccatactgcccgaggtaatttatagattcaatgccatccccatcaagctaccaatgactttcttcacagaattggaaaaaactactttaaagttcatatggaaccaaaaaagagcccgcatcgcccagtcaatcctaagccaaaagaacaaagctggaggcatcacgctacctgacttcaaactatactacaaggctacagtaaccaaaacagcatggtagtggtaccaaaacagagatatagatcaatggaacagaaccgagccctcagaaataatgccgcatatctacaatatctgatctttgacaaacctgattaaaataagcaatggggaaaggattccctatttaataaatggtgctgggaaaactggctagccatatgtagaaagctgaaactggatcccttccttacaccttatacaaaaatcaattcaagatggattaaagacttaaacgttatacctaaaaccataaaaaccctagaagaaaacctagacattaccattcaggaccatgggcaaggacttcatgtctataatttgttaaaatgaactagtgtttccaatttaaaatgtggttttctatctggctccaacactacatttcttcataagcttctgcacattatttaatgttaaatatttggattggaggttgtgttgaagcatgttttacaattatcttggacttttaagtggcaaaactattaatgccatttctttctttgcaaggcaaagtcatgtttttcttatgctactcgctgttcaaatctatgatgactgattgcttccggaactcttcttatatacatcagtcattttaagtagacacatttttatcagtatatcaaaataccatgcaatctaacctagttttgtcaccccaaccatattagtgatggaaaactggaaaacgttctattcgtttttctgtcatatgtcttaacaagctgcagtcttagagacatgctaaaactagaatatcgaatttaacctgctagtgactttttttgaaagaagttattcttcaaaggcatactactttaatataagatgtattttgggaagaagttttaggaaaatagaaatgacatttttagaacccattctgtattactttccataaagcagtcatgacaaatatttaatttaccttttacaatatttttagagatgaaaaagggagagaggtaaagtgaatccccagggataatacaactaggaaatgacagaatcaagatttaattccagggtccatgtttgtctacagaaatgtctttgccccttacagtggttcagccttaaatctgtcctgtgaattctctggaccttcaatacttcagctgttagaaaattggactggctggctgatttccaaagactctcttgtaataaaaaatctgtttaacatgatcaataatataccaaattagggagaatcatgctaagtatttcttaaattctttttttcctttccataggttatattatgttgaaaattagacacaaagcttcttctaagactaataatatgctgcaatatttattttggaaatgaaagcttatgattaatttaatagctaatatttttcccaaacattgagtcttggtagtaaataaattcatcatacttataattttcagcccaattttgaaagccagtcagatttgagtagtttactgtctatgatttaaactttacaaattattatttgattatttactatattaattatgaagtgtgatagtggtataaacacctattaagaaactgtattgttaaatttctgaatctttgaactgttctcttattttcagagttgacacagaactcaaacaactgaaccgcttaaatcaagattgttgaacattaactaaaagaatctcttcacagtataaattttcccataaaactatttccagtgttatacttgttttgtcctacactgctaattatacttctaaattaatctaaacaccatcagagtaccacaaggctgtacagaatgggagtattctggattagaaaacaggagattcatattttatctcaggcttctttaattagtcttaatccgaggtatgtttgtaggatccagaggtctatgaagtcctgaatttatgttcacaattttgattatatgttcatttttctatgaaaatcacctttacatttcaccagattatcaaatagacccataactcaaaaggtttgtaaacactgcactaacttttcgtcaagatgtcgcacatttcttatccctgacttcttttcataatttaaactaaatgatttgaaaggtaaattctaagtttaattttttgattgctctaagaacataactgttgatattatatctcacaaaggagatcgctattcattgcatgaagtatcacggagcagttttcccaagactgaaatactgaatattcagtttcttcttcattgctgtcttcacttcctggtttctcaaagtatagataagtggattcagaaagggagtgaagatggtatagaaaacagagagaattttgtctaccaggaagtttgtggaaggccacacataaatgaaaatacagggcccaaagaacattaacacaacaataaaatgtgctgtacaggtagaaagagccttggaggatcctgtggaggagtagtccctgatagtattaagaacaatgatgtaggaggtgagcaaaagcagaaaacttgtaagagcagtcacaccactggttgaaatcatggaggtcccaagaacataaatatctatacaagctaactggatgaccaaaggaagatcacagaaaaaactgtctacaacattgggaacacagaagggcaaatagagggaaaaactaattggctcattgtatgtagaaagcccactgtccaacaagaaactgccacaagctcaacacacactctttggctcataattgttgaatagcggagaggtttacatatggcaatatacctgtcaaaagacatggagatcagcagcacaatctcagtcccattgaagaggtgtaaaaaaaagatctgagaaatgcagccttcaaaagagatggtcttacgcagagcaaaaaagtccataatcatctttggtgtggcaaaggaggacaggcacatgtcaatgagacaggttgctgagcaggaagtacgtgcgagagtgaaggtgtgaggtggataggacagtgagtaaaatcaggcagttgcccaacatggtcattaaatagaagacagaaaacaccacaaaaaagaatatctggagttcaggagaatcagtaagtccaagtaacatgaattcagatactctggaatagttaaacccctccattcatctgcagactcggctttataattgtaaaaggaacaaaattacagagtttgaaaatgtgatatttctacaaccacatattaacttatcattcgcttaaagattgattactagattccaatgaaaaattctcagggtaaacgtttttggggggactcacttaacagttgctaccagatataatctgaaaagtttaacctcttggttttgaccagcatcagcacacgttgagctgtagtcatcacatgcccatacaattatacacctatctgaatactacttaacgagttatgtaatacacatttattgaggcagattacattacatttgtgtgctctactgaataaggcaggtaaataaaactaaaaataaaataagtgttgaactctcaaaggtttctcttacacacaaaaatgtgaatattttgaatcaactattgttaaacactagacttaactaagactttaatgatttcagaagatccatttaatatcttatgagggtgataaattatttaatttttaatttcttaattccataagacaactgataaccaaaaggcattcttgtaacctacaagagttattctccacttttggtaatttattatttcatagaaacatgttttaaaaagagaatctccctcctttaattctcttcattctacccaaagctatattttaaactagaaaaaacaaacaaaaaagatacattaagaactcagaattatttttcaaaattacttttttcatttacagtgcttcccaagttctagaaattttatttcctatggaatatcaatgtctttaccaaacagtcaaaagtgtggtacaaaacaagtgaaacttagtcctagtaaatgaaagctaattttgtgaccaggtagggtttactttgccagccacctaatgaaatttaagcctttgactacagaaattttagctgagtaactggaaatttgtccgggttgctggaaaatttgatgagaccaaaattaattaagtaaaaaaatatagtgttacatcaggcatttataagtctatatgcatctaaatcatttttttagttaaattgctttttccacatgtaaaactacatgaattcccttgttatattacacatttgaatatttcactttatatatttgaatatttatctagttttgataataatttaattataatagataatgcaattttatctaatcctgtattctaacttaccgtctttgaaaatgcaatatttcattccttcttcaataaaagttttcaaggtacactaaaaaagatttcattatgtcagtgaaacgtggtggacgaatgtcaaaaattttaaaatatcaatatactaatatttaagttatagtcaatatgcttagaaaagaataaaatcattgttataaactcaaagaatgaacaaatggaaaaagactcaaaaatgggccgggcacagtggctcatgcctgtaatgctagcattgtgggaggctgaggcagcggatggcttgagcgcaggagtttaagaccagcctggccaccatggcgaaaccctgtctctactaaaaatacagaaatttaccaagcatagtggcacacacctgtaatcccacaccggcttctccggtggctaaggcaggggaatcctttgaacctgggaggcggaggcagaggctacagtgagccaagaacatgccactgcacgccggcttgagcactaagtgagtacctgtctcaaaaaaaaaaaaaaaaaaaagaaaagaactatttgacttttattttcttcattatcttccattaatttattcccaatgatccttccaaaaattcttgaaaataaataataataaagaaaatcttgcattatgaatgcctgagactactgactattgaaattttagattgtagatcaatacacatatagatttaactgtctgacagtgccaatgtatcaattcagtgaaaaaataagttttatgattatgtgcccccttttttctgaattaactgattcgctgattaaatttgcagataagctgattgcttttagttaaaagtagtagcatggtttctagtctaaagaaaaagtcttatctgatttgcagtaaaagctaaaacaagtgttccaaaacaattttggcttcttttttggataactatcacaaattttacattgactacacattctgactttagaatagaaggattataccaattgttctgttgcagcaactttcagagtccagttagaagtggaaaaataaaaatgggaaaaaatctgattcatttttaaaaattttaatttgtttttaattgttgctgtgcagaagcaaatgtactggaaatgaattgtactcagttaattataatttaccttactattccatccttaactcattctgtgattgaacactaaatatcaaaattttaaatattactttcacggccgggtggaatggctcatgcctgtaatcccagcactttgggaggccgagatgggtggatcacttgaggccaggagttcaagaccagcctggtcaacaatggtgaaaccccgtctctactaaaaatacaaaaattagccatgtgtggtggtgggcatctgtaatcccggcacctgtaatcccagctactcgggaggctgaggcaggagaattgcttgaacccaggagacggagattgcagtgagcagagatcacaccactcactccaacctgggagacagagcaagactccatctcaaaaataaaaatacaaataaatgttaccctcagcaatatttttcctttagatgacctcatgttttcccatgtggaggaaaatctggttacatctccatttatttgcacatatttaaattgttttgtcaatattgaaaaattattttggccgggtgcagtggctcacacctataatcccagcactttgagaggctgaggtgggtggatcatgaggtcaggagttcaagaccagcctggccaacatagtgaaatcccatctctactgaaaattaaaaaatttgctgggcgtggtggtgcatgcctgtattcccagctacttgggaggctgaagcaggagagttgtttgaacctgggaggcagaagttgcagtgagctgagatggcgccattgcactccagcctggatgacagagctagactccatctcaaaaaaaaaaaaaaaagaaaaattgtttttaaattttgtcatagaatgatattcaagaattcttaaaaggagtctatggctcagtagttaagagtagttacggtattcttgacttcacttatgtctcagtagcctaagatttgacctctacttgtgagaattatattagatggtctatgtaaagcttgaagcatattttctgggcaaaatttaaggaattttctaggtttgaaaatccaaatttaacaatgctgttcagaaatagtgtgttttattattaataacatatgcaataaaaattctaatctatttaatttcagggatttagaaaaagaccatgtactaccaaaataatttcatctgtttgaaattgcatttttcatatcaaaatggcacaagttccttttatattaaatgcattgaaaaccctcagcttcacacatttgaatatttctattttactgacaatttatttactattgggaactactcatattgatttaaacatacacataagtttatatttatatttttttctccttttcatcaccagaaagaatgttttagttcctatttaatggaaccatccatttttatgtctttaagtcatatataattttttctttgctattcctccattgtttctgttttatataattattaaataaatgtcaattgttttgctatctgaagaatgcaaaccacaactgcttctgaagaccctatcatatctagcttttaacctaccagttatgcacctagcgtcaaaaacaccatttcctccgagattcacaagcctactgaaatcaccatagttctttagtaagcatcagaagcctggagtatggatgtatatttttctcctgtctttattataaaaccccttagaaagcagtgacatttactagatcagggattaaacactataatctacttgcagtgggagtcattaaaatgttgacccaactcttcacagagttgcaacaagaactgtgaagtgtgtctttgctatttaaagtgggaatgcactcctgtgatgtagcaatgttcattggagaaaagcacaactgggactggcctaggagaagaaaacattgaagcagtcatttgcagagcatatggggaacaaaaattactcctttagttatggaaatattcccatatttatgccccagtttgcaaagtccaacaattggaaaattattcttttaggctaaggcaatttgtctgcagcaaatacttgcttactggaagttgcgtattaaaggaagtatcatgcattaaagtttctgacaatacattaaaaaattagcgcaaactaatactgatagctgtttcgagggataggtgaatcatagaaagggggacgttggaaagtccaacatagccaggaggagagaagagaggtagtatgtagtaccttagatgaatagtgtaaaaattaaattataaaaataaactttaaacattcagttcaatgcttactacaaggaaagtacttaataaaatatagtagaaataatagcagggatgtttataataattatcattatttttgaagtgttcataatggattatccaggaagatacagatgtggattcacaacccaaaaccataagccaagggtcttgccatatttacctgcaggtcaatgatttatctgtggcttgctctctaagcacgacttgtttcccaaatacctgaaagactgaactcttcacaactgtcatatccatcgtacattccccacaggtctggcaatagaccccaagaaaatcttccctagctgaccacatttctagcactctttgaaataaggaagcacgtttagttttaagatgtttttccttctacgaagaaaaaggaaatgattttttaaaaacttaacaaaactggtataaagatttaatagttttctagttgtcccttggtatccatagaagattggttccaggaccctcgctgataccaaaatccatggatgttcaaatccctgagttaaaatggcatgatatttgtatacaatctaaacacatcctcccatatactttaaatcatcttagattacttatgatgcctaatacaatataaatgctatgtaactagttgttatacggtatcactttctgaatttgtattatttgtattgttttttattaatattttggatccgctattggttgaatccaagaatatggaacccacagaaaaagaggtctagctgtaaatctaaaatatgtatccaattgtaaaacaaaaaataaggatatatagtaattattagagtaatcctggaaaactgtataaatcctggaaaacaggtataattattattagagtaatactggaaaaggcaagagaataaacagaaaaataatagaaataaaaataattcaaaaaaaataattcagaaagagagcatgaaggagttttttggtattagtaacctgttgtatatcttggttgtggtgctgattacataatatatatgtatgctaaaattaatggattgtttaccagaacaaagaaaaggtccattttactttaagataattttataaagtagaattttaaaaagtaaacccagataattcagtacaagggcaaatttcaaaatgagaaaataaattcaataaccttcttataaattattcaacaatatattgaacttaaatatattgaacttaaatatatttaattgttaaatatattgaacttaaatatatttaattgttaaataaatatatttaacattatattaaatatgtaatatattaaaatgtaatatgttaaaatgtagccaaaaagaacctattcaaatgaacaataggctatataaagtaaataggaataatcttaaacagaaatgtgttgtttataaatgacaaaagctatactattctaaaaaaagaaaaaagttgacaaatacatttaaatacttattatggtattggagaaaaatgcaacatcgttcaacacatacattttccctcctataaaatgaaattcaataaaccatgagatatttttgagttcacaaaataattttcaaaatttgtctgaaggcaaatcagattaaagtagtcaagaattagaaatattatttcgtttgtttgctttatgttttggtttttagctaacttaagctttttttattcgtacaaatttatgggatacgtgtggaattttgttacatgtatgtaatgcatagtgattaagtcaggatatttagggtgttcgtcactccagtacaatactttttaaagtatagttatcctactctgctatcaaacattcaatttattcctcctatcttatcctttagtgcacttctctttattctttcccctgccctttccactcactcttcccagtctctgtgatctatttttccactttctacctccacgtgatgaaatttttttagctcctgcatataagtgagaacatgggatagttaccattttgtgcctggtttatttcacaccagttttatccatgttgctgcaaatgacattatttcattcttttttatggctgtgaataatattccattgtgtatatacaccacattttttgttggtttgttttgttttctgttttattttttcatgatttttattggaggatatcatcatgaaatattctgtattttgtatgttactggcttgataatagatcatgctcgggaattatttcagagcttcatcacctcttccaagcaccacttgggacctgagtaccccaaacattgctgggtacacctgcacatcatgctactgcccctgcgcaccagcacatccctggctgctgagccgtccaccttgccatcttcactggtcaacagttctgcatgcagtttgaagagctttgcaaaatccctcaccaacttcacaaaccctgagtctttttactatcaccttcataagcccaaaaccccacttaggttggtctcatatctttgcattgtgaaaagtactgcaataaacatgcgagtgcaggtatccccttggtatattgatttttttcccctttgagcaaatacccagtagtaaaattgctgtttccaatggtgattctatttttacttttgtgaggaatcgccataatgttgtctacagttgctatactggtttacattcccaccaacagtgtagaagagttcctttttcaatctgttatattttgttttgctttgtttttgtttttgtttttaggaatagtcattatgactaggggaaaataatatttcatcgtggttttgatttgcatttatataatgattagtgatgttgagcattttttcatatatcttttggccttttgtatgtcttcttttgagaaatgtctatttatatcctttggccactttccaatggaatttttttttcctgttgagttgtttgggtttttggtaaattctaggtattagcccactattagatgaacagtttgcaaatattttcttccattcaggaggttgtctcttcactctgctgattatttcttctgctgctcagaagctttctaagttaattaagtcccatttgtctatttttatttgtgttgcttgtggcttttgaggtgttagtcataaattctttgcctagacaaaaggccaggaaatttttccctaggttttcttcaagtatttttatagtttcaggtcttctgtttaagtttttaatctactttgagttgattcttgtatatagtgagatagtggtccagtttcatttttctggatgtggctatccaattttcccagcaccatttattgaagagtgtgtcctttccccagtgtcagctttgttgaagatcaaatctgcaaacaaattataaaactgtaatatctaagtaatattggagaagcacagaaaacaactgacaatataagggacttgagaacaatgaattatatatagaccaagtatatataagaccttacaatattataatgtgaatatgttacctgaattgccaaaagggactttgtagatggatttaaggttgctaatcagcttgccttccaaatgctaccggaggtacaaagaggagctggtaccattccttcagaaactattacaaacaatagaaaaagagggactcctccctaactcattttatgaggccaacatcatcctgataccaaaacctggcagagacacacataaaaaagaaaatttcaggccaatatccctgatgaacatcagtgcaaaaatcctcaataaaatactggcaaaccaattccagcagcacatcaaaaagcttatccaccatgatcaagttggcttcatccctgggatgcaaggctggttcaacatacccaatcagtaaacataatccatcacataaacagaaccaatgacaaacatcacatgattatctcaatagatgcagaaaaggccttcgataaaattcaccccttcatgctaaaaactctaaataaactaggtattgatggaacgtatctgaaaataataagagctatttatgacacacccacagccaatatcataccgaatgggcaaaagctggaagcattctgtttgaaaaccagcacaagacaaggatgccctttctcaccattcttattcaacacagcattggaagttctggccagggcaatcagggaagagaaagaaataaagcgtattcaaataggaagagagggaggtaaattgtcaaagtttgcagatgacatgattgtatatttagaaaaccccatcatcttagcccaaaatctccttaagctgataagcaacttcagcagtctcgggatacaaaatcaatgtgcaaaaattacaaacattcctatacaccattaatagataaacagccaaatcatgagtgaactcccattcacaattgctacaaagagaataaaatacctaggaatacaactaacaagggatatgaaggacctcttcaaggagaattacaaaccactgctcaaggaaaaagagaggacacaaacaaatggaaaaacgttctgtgctcatggataggaagaatcaatatcatgaaaatggccatactgcccaaagtaatttacagattcaatgctatccccatcaagctaccattgactttcttcacagaattagaaaaaacaactttaaatttcatatggaaccaaaaaagagcctgtatagccaagacaatcctaagcaaaaagaacaaatctggaggcatcacactacctgacttcaaactatactacaaggccgcagtaaccaaaacagcatggtgctggtaccaaaacagatatatagaccaatggaacagaaaagaggccttagaaataatgccacacatctacaaccatctgatctttaacaagcctgacaaaagcaagcaatgggaaaaggattccgtatttaataaatgatgtgaaaactggctagacatatgcagaaaactgaaactgaaccccttccttacaccttatacaaaattaactcaagatggattaaaggcttaaatggaaaacctaaaaccataaaaaccctagaagaaaacctaggcaataccactcaggacataggcattggcaaagacttcatgactaaaacaccaaaaccaatggcaacaaaagccaaaattgacaaatgggatctaattaaaccaaagagcttctgcacagaaaaaaaaaaaaaaactctcatcagagtggacagtcaacctacagaatgagaggaaatttttgcaatctatccatctgacaaagggctaatatctagaatctacagggaacttaaacaaatttacaagaaaaaaacaaccccatcaaaaagtgagcaaaggatatgaacagacacttctcaaaagaagacatttatgcagccaacaaacatatgaaaaaaaagctcatcatcactggtcattagagaaatgcaaatcaaaaccacaatgagataccatctcatgccagttagaatggtgatcattaaaaggtgaggaaacaacagatgctggagaggatgtggagaaataggaacccttttacactgttggtgggagggtaaattagttcaaccattgtggaagacagtgtagcgattcctcaaggatgtagaaccagaaataccatttgacccagcaatcccattactgggtatatacccaaagaattatatatcattctactataaagacacatgcacatgtatgtttactgcggcactgttcacaatagcaaagacttggaaccaacccaaatgcccatcaatcatagactggataaagaaaatgggtcacatatacattatggaatactatgcagccataaaaaaggatgagttcatgtcatttgcagggacatggatgaagctagaaaccatcattctcagcaaactaacacaggaacagaaaaccaaacaccacatgttctcactcttaagtgggagttgaacaatgagaacacagggacacagggaggggaacatcccacacgggggcctgtcacagggtggggggctaggggaagaatagcattaggagaaatacctagtgtaggtgacaggttgatgggtgcagcaaaccaccatggcacatatttacctatgtaacaaacctgcatattctacacatgtatcccagaacttaaagtataatttttaaaaaagacttcaccaatattatttatttttcctgttgcctcaggttccaacatggctcaacatggcagttgctgatcctgactttgcttaaaatttggtactttatcacaaattttaaaattaattttgatttctcaaaatattgattaaaatatttatctctactattgaatttttgggcacacctttaaattttgcatgcaagataagcaccttcctcagttgtaggatgttgacggtgataaggacattagcaaaggaaatattgaaaagctcatgaatactgttgcataattcttcttagagaaaatagtttcttggtataggatagaacaattgctaaagggaaggtgacctcctacatagcatgaaaagatgtgtcatgatcttggtatttgtaatttgttccctttcactctgctcaactaaaacaaggatgaaaaacatttttccattaaagattattaattttaaaaattaattgagtcagaaaaaaatgcaaattaattttattttattttaaaattattttaatcttttgctttaaagaaaacactgagtttatgggtcactttacaagtgaaataagaacacagatttgggggtaataaacataatttagcaccaaatatatttgttctaatttatttcacagtttaaaaacaaagtgtaagagtagaaaaaggaaagaaagaagaaaggagagagaagtacagaaaaagttacaataatcaaaataaaaaccaagagaaaagggaaaagaaagactagcagagacataaatggaaagatagtcgtatgacttaaaaaaaaaaaaggtgaagagacagagagatactagtccacgaggagagcaagaccatccagaggcagaactccttatccaaggaattcagaagtaattagacatccctattatgtaaagctggcatctggtatgagatttcttttccaaaaatttgtgagtaaccagaatttctatgcatctctggaatgcatgtattctaaactcattgtgcaacccttgctgacatcaaggcaccaaaatgtctataaatgtaattgtttaccatgacctatgtggctaatatggtaaaaattacccttaagctcccactttaaggtccataaataccctaaggaaaaatctagtgcagtggcatactcagtcctctcttgctgaggagccctgctgcacttctctgcagcattctttccatctaatacagctttcctttccaaatctatacagttgttggtaaattcttcttactacccacaagccaaccacactccactgcctgggctgtgacagctcgcatggcagtccatataaatgcacagtctacaaatccatataaccacaaaaagaaaacaatgataaagagagctgcacaaaggaaaatagagaaaggaagcaaaatgaatgaggttagatacgttcttaggtggaataacaaccccatcttggagtaggttagtcttgccaccaaaacttttaaaaacatgatttttttcataattgtgcatataatccaggatcttactcacctcttaatgttcactctaatacataagataaaattaatctgaagatctaaaatagtcctcaaaatggagactttttaatccttctaggaaagttttatcaccttggatagattttttcctccagataatcttgaattaattttacaatgaaaagtattactggtattttattaaattgtattcaatttatgcattggcatgtatatattcaataatattacttttaaccaacaaaagagtttgtctctgaatttattcatttttttctcaaaaaatattaccactttttacatgaacagatactttccaaaagaaaacatgtatacggccaataagcatatgaaaaaaaaatgctcagcttgactattcattagagaaatgcaaatcaaaaccacaatgagataccatctcacaccagtcagaaggactgttattaaaaagtcaaaaaatggctgggcacggtggctcacaccttaaatcccagcactttgggaggccaaggtgggcagatcacgaggtcaggagatcgagaccattctggctaacacggtgaaaccccgtctctaatacaaaatacaaaaaaaaaaaaaaattagctgggcgtggtggcgggcgcctgtagtcccagctacttaggaggctgaggcaggagaatggcctgaacccgggaggtggagcttgcagtgagccgagatcgcaccactgcactcagcctgggcgacagagtgagactccgtctcaaaaaaaaaagtcaaaaaataaaaattcaaagagaattgtttttttctttttttacttttatggcacgacttctaatatttttatatccttaacactttatacaaaaaaatcaaaggaagaagaagaacatttaagtttactttgtttcatttttcagagttaatagttgtttcacattctcaccaagatttgatttttaaatgtggatcttgtatcctgcaacccttgataaatttccttgtaaattatagttctttaaagacaccatagtatgctctacacatatatttcttctatgaataaatagatttttatttttttcttcctaatattaatacctttaaaaaaaaaactttatttcagtggttagcacatgttgaatagaagtggtgagagcatgaatacttgcattcttcctaatcttaagggggcatgcattcaagattttatcatatgttataatggttgctgtaggtttttcataattgccctttattggactggagagggtccctttcatttccaatgtacttagaattttttacagacatgaatggatgttaaaacgaatgattttctgcctctattggcgttcaccaccacacccagctaatttattttattttattttattttattttattttattttattttattttatttttatttttagtagagttgggtttcaccgtgttagccaggatggtctcgatctcctgacctcctgatccgcctgcctcagcctcccaaattgctgggattacaggcactagccactgcgcccggctgaggacatgtgtttaaaaaggtagcataactcctatttctagctgctcttgcaactaaaggtggctgtgtacagaataactctattcctctatatcctgtttggacaaaccatctttccattgatttaagcacactttcagaataaaacgtaatttcttatctcaggaattccaaagtctaatggaagaggcaagcttatattgaataatttagcaaagcagattgtgcttggcaataataaagtaattcaatatataaaacataagaaaagaaggaaatatctgtttcatagttgtaattagaactttactatgcagaataggtagagaggcattcctcaaaagattaagagaggtataaagtaaatgtaaatgtcaactataggggttttcttaggcagagaatcatgctttagggtaaatgaaggtgacgctggtattcaggttcctttggagaaggcaacaataaaagtagagttatcatttatgagatccaagaagcccaagaaaagataataagagcccaagccacagcaggctcagactctttttcctaaataaaaaggaacgaatagctaaatatgacaaaagtcaaggtatcttttaagaaagttacacttcccctgaagcacaacagaaatcaaagatagtcaccctacagcactccttgcctctcttccaaggatacagctatgtattgttttttaaaaaaggtaaagggaatatatcacttgaccatgtctctttccaaggtgaatttctccaaaagcacaactttggggcacttgtatgagatatagtttaaaccccactgaatttgatttcccaccctcccagacacttacctttattattttctcatatttgtttgcttttgtttccttaatatagtccaggaaaggtatttgtgggccgtcctacaggagaagttataatgaattgaaaaatgtgaagaaccttctattctcccaagagtatatggcaaagagggtttaattgcacccaaaatatcagtgtggaagggtcacataactgatactataaagtaacacattgtcttacagaattttcgttcttaggctgaaatattaccttcttcatcaaacttacctgaccgcatgtttgatgttgtttgagtaaaatataatactcttttatttcccaaatgcacacagacacacacacacacacacacacacacacacacacacacatattatgttttgggaaatatatgtgctatagtatctatatttattcacttcttaaatttgtacttaattaaaatgacaagatgaatttgctgaaaggagttggtaaaatgatcagctgtattcagtcacataactattgtttagtcttagtaatgaaaatagaaaaaaaaaaaaaaaaaaaccagccaggtgcagtggctcacgcctgtaatcccagcaatctgggaggccaaggtgggtggatcacctgaggtcgggagttcgagaccagcctggccagcatggtgaaacctcatctctaccaaaaatacaaaaattagctgggcgtggtggcacgcacctgtaacctcagctacttgagaagctgaggtaagagaatcacttgaacttgggaggcggtgcttgcagtaagccgagattgcactactgcactccagcctgggtgacagagtgagactccacctcagtcaaaaaaaaaaaatgaaaatagaaaaaaccgacagacactaaaagctaagaaaatagtgtgttcattttggaatctaattcaaaattcattataatgaattttaacgggccaccaaaggcatgtgttgaagttcactgaatattattcaatgtttgagaattacagacagcacacatatttcatttgtagcaatgtctgatttgttttgcatatatatatttgcatttatttaaaacaaaaaacgtcaaaatatatttcatctgttatttggaaaaaacattgagtaactaattgtccaaatataggtctctattttctaatttttaattaacaatgcttcttatttaaaaaaataacttatttcaaaataactgacatttaatgtttttacattttttaaagtgttcatgtacatctatttaatttctagatatcgtgagggaatcgtcactgtatctggaagccagatgccaaagatgttcagttattatcaatgtatctatgcataaaggattgaaaatgattcttcatgccataatttatctaaatattcattcctttggaacactgttttccaccaatagtaacaagacttggaacaaaataaaatagtaatatcatgtgcattttctatttgtgcacttttccacttctggaaatagtcatagaatcattttgtgacagattactatcatccatgatcctaagtcactaagaataagtgttagagtctttgggttaaattgccataaggactaaatttattttttaaccaattccctaaagaatcaactgatttttagttttacagcatatgtatgacctctccatccattttgccttaattctagttctttttatccttcagtggtgagaatgagaaaacctggatgcatatggctatggttgatttgaaaagtactttttaaacatttggaagtttttcaaaaccaaaagcatatttgccaagtgatcttttccccctacattttaaatccatgtgcaacctaagagaaatttagaccatatgctagttcagattgacttacattaaaatcatgaaaattttatttaatagctctttgacacacagggagtgtttaaattaagcttctctaaactttacatttttcagaatacactctgttttctatctaccctcaactactcctcactactctccaggaaaatatcagatttaattcaggaggtgtaagttggatgttttcagtccatcaacaatgattaagtaatttaaaaagcattctttttttcacttcttctctagttttcgtttgtttgtttaaatatatctgtgcaagttcagaacagttttatttatattaggaccaataatctgaggaatgaaataaattgttgcatttgttgcaataaatgagtttatgctccctttacagaacattaaggacatgaacttttaagttttaatgtttcactataaatgatacttgagtcttctattagaataaataaggtaaaccttatataaagaaaaaataaaaatcttctccttctcatctgcatttgcaatcccacatgcactgaagtaatcaatgttaatggttttctgtccatttggccacacctctaatggatggaatttatgtagtgtaattctttgtcaggtacaactacacatgagtaaaactaggtgtgatttaggactcaagattaggatttttaactagtagtgaaatgggaagggaaaagcaaaggtaaaatatacatcaactaattgcagaagggtgtatagaagggagtcatctgtatatatgacatctgatggccccgccactcagctaacccatccacgcttgaaatgataaatagacaagtgcattgaaaattgtaagtgtgacggaaaggtcaccacgtgattgctactattatattgttttattattttgttctcccaacaatgtgtagctcaaatttatactacaggctgttcatatcccttaacaaaatatccattaatttatgaatttgacaaaattctaacttactgcaatgtcctataaataatagttcggcccatctgcggtgatgactgttccagaagatctttctgatgttgaataactaatactgtttttcaatgttactattaggttggtgcaaaaataattgcgatttttgccattaatcccaactacatttgcaccaacctaatagtaatttaacatgctgtatctaacatttgtggacactgatcgaatatgcaatattctggggagaagttggtggaagagatgtgtgttgttttgtgaaagatagtattctgagggagggcagaaaagggatatatatgtaagaaaatagtggatcttgatcagatgcatgcttgttcctatttacaagaagtctactctgtgttactgaacaaataaacttacatgaagtcaactaattccaaagaatttaccgtctagagaaattcacatttgtaataataaatagttttcttaatgacagaaatttcatgtcttttttattttatagctataaacatagagttataaaatctaaatacagacaagcctacccagtgtttgattatattcaatgatgtttaaaagtaatagcctctcttttgttcttactgggaacattatcattagcacagtgcttcatacaggctcttattacttctatctcccattgttatgattggcaaagcacaaagccatactcaactaggaatacttgggcacattgcagcatttatcacagggtggactggatactgagtttcttaatttataaatttttctttccaatgcaaaatttgtgaaggcttaatgttggaaaaatgtctgaatggctataaattcccttcctaattccctcccctcaatgcatacctgttttttttgtttttttttttggctcattcttagaactgtagctgttcttgaatctttgatgggttgaagctaatccacattcagattttacaatctcatataattgccaaaattctacccttcaaaacacttgtttctttctttttttctcttacatttcctaaaagaaaattagtgaaaaaacaattttttatttggtctgaaactttatggcaaatctgaggacaggaagaaattagggacttctttgtgcacttttgatttggcgaatacctggaatatatatttttctctctgcacaatgcaaagtagttgcactcacaaagtatcaattagaaaaagaaattcttcccacatttcatcagagttttaagtggttacactacaataatccccagctatttgggaaatggtaaaaaaaactttgaagatcaagccatcattattattttcactaaaacctaaaaattcagccacaatatgtcaaaccagttgggacaggacttccttcctctaatttagtttttactgctggatacctgatgggctacttactatatccggtgtctcatagggcaaattgtacttggagacaatgtgaatattggctctgttatactcatcagtctgagccaatataaacattctatgagtaattctgaatactatcagtcagcttgtcttcagcctttaaatttagtaataatagcaaaaatagtcaacatttattgagaactatgttccagactttactaagaactttatctgcaacactttatttaatgctcatcaccaatctgtgagatactattgttttgctcacttttacataaaggaagtagggcttaaagaggcaaagtaacttgactatgattacatagctaataaattttggaaaatgccatgatttaaaactgtgattgtaaaaattatagcaaaacatcagaccctcttattatttacctcccctctttctttggaggtggtcaatctgttcatatataccataaatttttctcctatcaaaatggcttcataacatttgataacaattaaggaaatctaaacaatgtatggactttaatttaatatcatgtggcagtattggtttgttagtctcaaaaaagttaccataccaatacaagaagttactgagagaggaaactgagtgtggggtatgggagaacactctgtgttatagtcaattttctagcaatctaaagctattttaaaattaaaattctatcttaaaaaatgactatataggctgggtgcagtggctcacatgtgtaatcccagcactttgggaggccgaggcgggcaaatcaccaggtcaggagatcgagaccatcatggctaacacggtgaaaccctgtctctactaaaaatacaaaaaagtagccaggcctggtggtgggtgcctgtagtcccagctactcaggaggctgagcaggagaatggcatgaacccaggaagtggagcttgcagcaagctaagatcacaccactgcactccagcctgggtgacagagtgagactctgtctcaaaaaaaaaagaaaatgactgtttatgcatacccagccggtgtttaaaacaatccacccatacaactaacagacatcttctatcacaattttatgatggttttgctaaagagtggcaaaatatactcagaaaccaaattagctgatttcgttaaacccattcttcttaatgtcagaagcccttactccatgttttcaaaattcatgatattgtaaggattgtgaaaaaattcgaaagcaaattaaggtagtcaaaggaaaagtgtttacaaaaatgttactagcacaacaatccatctacaaaaatgtgaacatattttaataaccttgaacatggcaagaagagttgcaatataaaaagagatttacatgtacaaaagctgagggaaaaagtttcagcttcaagcattaacgttttagttcataaatctgaaggaaaataaagagaaaataaaggcattaagagatatgaaacaatgtaaaaatgaatatttcttttatgaatccttgtgaatatatgacagtatacaagctacagaaaactagtttactgggcggatcacgaggtcaggagatctagaccatcctggctaacacggcgaaaccctcttctctactaaaaaatacaaaaaattagccaggagtggtggcgggcacctgtagtcccagctactagtggggctgaggcaggagaatggtgtgaacccgggagtcagaggttgcggtgagccgagatcgcgccactgcactccagcctgggcgacagagagagactcggtctcaaaaaaaaaaaaaaaaaaaaaagaaagaaaaaagaaaacagataaaggacaagcaaatagagagggggaaagcagccaccaccgtaatttgaacagtaaaactgagaggaactttgaagtggaaaggagtgtagtctttatttcatccttggggatttgtcagggctggaggatgcacacaacaaataaataatttagagtgctctgaaatatggtcagacagcatatgccttgcagttatgtctacactttgtgcttgatccaagcatacatattattggggcaatatctgactgataccttttaaacacaccacacacacacacacacacacacacacaatgttttatagaaaatatatctgggcctggctacatttccagagtgccccatttctcttggttcaaatttccgtctagaaatcaagttaaatctttgggatgacactaatgttgtaaaggtgctgcataaaaataagattttttaaagtagataaaccattcaataattttctacagcaggtgaatgacagaagcattgacctgaaatttcacaatggactccagtgagaattccctgcaatcatgtctcttttcccatttgttaagtacaaccacagtactacaaccacagccacaactacaccaacacgatttcctcacatgatcagctgtactttcctgctctagtccaagatcttccagccatgccttcctacagcactctacagcaagggtcagcaaacattttctaaaatgagccagatagtcaggactgggaaaggctttgataaatgagagagaacgagtgactacacagccgggaggagtgtgaaaacagaaaaaggacaaggccgggcgcggtggctcacgcctgtaatcccagaactttgggaggccgaggcgggtgaatcacgaggtcaggagattgagaccatcctggctaacacagtgaaacccctgtctctactaaaaatataaaaaattagtcaggtgtggtggcgggcgcctgtagtcccagctactcgggaggctgaggcaggagaatggcatgaacccgggaggcagagcttgcagtgagccgagatcccaccactgcactccagcctgggccacagagagagactccgtctcaaaaaaaaaaagaaaaaagaaaagaataaagaaaacagataaaggacaagcaaatagagagggggaaagcagccaccaccgtaattcaagttttatgtgccgtaatgtcgctctcaactgctcacctctgctaatgtggagcaaaagcagcaataggcaatatgtaatcagagatatggctgtcttcttcagtgaaacttaataaaaagtggcagcaggctagatttggcttgtgggctatagtttgtcaaactatgatggaacgtttaaaatttccctggttactttaactgcaaaagtgagtcttgcatgttatattttacctcttccagcagggcatacagagaggagctagtcagaacacttctttttgacatttatatactgagaagtataccagtgtgttactacagtacatcatggagagtattctatcctttcctttcagttctcatcttttgtcctagattaatagagaacatcaagtactgttttcggacagaaaaactaacaagccacctaaacccagtctttctggcctcttaacattaatgttgaactttccttatgcacggtcaacaaagatgcttcaacacttctgtaagcttctccaatcagacattgtgtttcattttatcatctgcaaaaagcaggggaaagagtttccaattttgtattggttatcaactgcagcataacaaaccaccccacaactcagaaaaataatcatttatcctctcagctcaagtatctggaaacatctaagaccaagttgatctaggttgaaactagttgggcttccctgaacttgcacttctgcagtttactgactggagggagttttattatttactggcttgcattgggcaaattatctaacgaggatctgcaccacctttcttcaatcttcctggaaacaagagactagctgagatatgtttgtctcatggtagtgaaagaggcacaaatcaagtgtaattatgcaaactccatttaagcctttgcttttgtaatgcctgccaaagttccactggtcaaagcaagccccaggagtaaacctaggtcaccaagccatagtagaaagacactacacgtggagcggattcagagaagtgtgaacattttagtcagatgtgcaacctctctaagactggcacaaaggtgagtgtcagtaaaagcccagcttaattccagctacctgatgttcagttcagtttttcagctgtaaagaagagaagatgatgcctaccacagaagatcatttgtgcaattacaaggattaaataagaatatgagaaatgtgtgaagtgcctaatacaaagttaattggtaaatgttctatatttttcatatactcttgggcttgaaaacagattaattctaagctttctaatattattctgtcataattgcatagtttagtgggcctatcagcatgtataagcaaatgttaatcagagccagccaaggttgtgtcttttggataccaggaaagagttaccgtggctcttagagaggaattgatatggagtttagtaaaaaaataaattttagtttgctatccaaaatatatgttttgtaaatagagctaagatttgactggaaatttgagaaaggttggacaattagttatgtatataagaaactgtgctgaacctgccaaattctttgaagtgggtcacaatgattgaacagagaaggtgcaagtatgatatacaggaatatcacatgacaagatttagtgggtaggtggttattgccatttggtctgttttgctatttataaccagtcttaggagttttctttaaaactcatgaagaaatgagagtctacactagcacacaataataatatagatcggttgaaagtaaaaggaggaaaaatggtatgttatgtaaacattaataaaagagggcaggagtgttatctcaataccagctaaaattaatttcagagcaaagacaattgggagagacagagaagggcatcacgtaagacaaaaagagtcagttcacaaaaaagatctggcaatcttaaatgtacgtgcaaccaataacagagctacaaaatatgtgaagcaaaatctgatagaactgcaagaataaatagacaaatcaacaatcgtaattggagacttcaacaagcatctttcaataattggtagaaaaactagatctaaatactgtcaatgttatatatataaaaaaaaaactcaacaacaccatcaagcaacaggatcttactggcatttataaagtgctccaccactggctgggtgcggtgggtgtaatcccagcattttgggaggccaaggcgagtggatcacctgaggtcaggagttgacgagcctggccaacatggcaaaaccccatctctactaaaaatactagaattaaggctgggcccggtggctcacgcctgtgatcccagcattttgggaggccgaggcgggcagatcacctgaggtcaggagtttgagaccagcctcaatatggagaaactccatctctactaaaaatacaaaattagcccagcatggtggtgcatgcctgtaatcccagctactcgggaggctgaggcaggagaatcacttgaacctgggaggtggaggctgtggtgagctgagattgcaccattgcactccagtctgggcaacaagagtgaaactccgtcacaaaaaaaaaaaaaaaaaaaaaaaaaaactagaattggccgggcgtggtggtgcatgactgtaatcccagctactcgggaggttgaggcaggagtatcgcttgaacccgggaggcaaaggttgcagtaagccgagattgcgccattgcactccaacctggacaaaagggtgagactctgcctcaaaaaaaaaaaaaaagaagaaaaaaacgggctccaccccctagcagcagaatacagcagaacatttaggtacccacagaacataaaccaaaatggactgtatcctggattttaacaaacattaagaattttttaaaaactgaaatcctgtagaatgtatcctccagccaaaatggcatcaaattaaaaataaaaaagtaaaataacagcagaatcttaaatacttgaaaaataaacagcatacttttttagttcttttttttacatttttatttattttaacttctggggtagatgtgaaggatgtgcaggttttttacataggtaaatttgtgccatggtggttttccctacctatcaacccatcacctcggtttaagcccagcatgcattagagatttttcccgatgctctcctctccctcccccatccacaggccccagtgtgtgttgcttacttccctgtgtccatgtgttctcattgttcagctcctacttataagtgagaacgttagaagtttggctttctgtttctgcattagtttcctgaggataatggcttcctgttccatccatgtccctgcaatggacatgatctccttcatttttatggctgcatagtattccatgttgtatgggtactacattttcttcatccagtgtattaccgatgggcatttaggttgattccatgtctttgctattgtgaatagtgctaaacagcaagcacacttctaaggagaacgtctcaagggaaacaattaaatatattaaactgaataaaaataaaaatacaacatatcaaacttgatttaacacagttgacatcagtgctgagaggaaaatgtatttcactaaatgtatataatagaaaagtagaaatctctcaaataaaaattcaagctatcacatcaagaaagtagaaaatagtagcaaaataaaatcaaaacaaatataagaaagaatataatagggataagagcagaaataaatgaaacagccaaaagaaaacaacaaagaaaagcaaagaaataaagctggttctttgaaaatatctataaaattgacaaaccttaactaataatgataaagaaaaaagggatgtcataaattaccaatttcatgaatgaaatgggctatccttacagaccttgaagacatgaaaatgataaaggaatgtcatgaacaactccactcacatacatttgacaacttggggaaaatgggccaatttcatgaaaagcagaaaccaccacaaaactcacccaatctaaaataggtaatttaatagccctaaaatgtaaggacatttaatttctaattttaaagactcctgaaggagaaatctccaggacaaaatggttttactaaagaattttatgtactgcttaaagaattgacaccaatacacacaatcttttctgaaaatagagaatctttcccaattcattttatgaagctaacattactctgatatcaaaatagtacaaaaaagtaaactatagcctggtaattctcttgaacatggatacaccagttcttaacaacattagcagtagcactcagcgatgtacacaaagaattacacatcatgtcccagtgacgtttactccagtgactgcacacctagacattcatcccactgaaataaaaactttttttttgcacttgtaattggcttcccctctgcttttgttggcaagagcaggtcggtgtcccaggcttagaatccatttttctctctttctctccatctgtctctctgtctccgtctctgtctttgtctctccctctctctctctttttttgacagagccttgctttgtcgcccaggttgcagtgatgcgatctcggctcactgcaagctccgcctcccgggttcacgccattctcctgcctcccgagtagctgggactacaggcgcccaccaccatgcccgctagtattttgtatttttagtagagatgaggtttcaccgtgttagccaggatggtctttatctcctgaccttatgatccgcccgcctcagcctcccaaagtgctgggattacaggcgtgagccacagtgcccggccagaatgcatttttcctcccacaccaaagcacctgcagtatgggtgaagcagcctggagcctggctgcataagcctgcacagcaggagggtcccagcaggagggtcgaggtgccactgcctgggtccagctcacaggctaccagggaggctccgatctggctccctggtgctggcagtgtactgttcccaggatctgcatgtgggggtgccttcctgcatctccccatcagtggtaggtgctcctcccagccgcctctttcaggcctggagacagcggcctgcacctcaaccctactgcatgccagtgaagcgaagcaccccgggccagaagccccacagctgttggccctggtttggacaccaggcagggggcaccacagcaggagctagcagcccagccccgattctgtggccccgagtgccccgttgctgatggccctgtgttctgggcacggaccaaggaggagcaggtgtggaaggcgcctcacgcaggccctgggctccgtgggcgtcttgtgctcggagattttgaggccatttgcatccagcttcgccaaccagagctctaagctgcagcggcggccacccgcaacagcaccaccactagtgtcttgggggctttcttcagaggaggctgtcagcatcctcgagttccaggcgctctagccccagtcctgcttcaagaggctttttcccaccacaggcttctcctcagtggccagaaagctgggtcaactcccatgaactttgccagtaacgcaaggctgtcactgacatttgtggcgccaagacttgcgcacgcggattgcacacatcggccacttcctgcaccacgtgcaatgacgcgcgcacgcctcacgcgcacgccgcataacgtctgaggcgcgcacgcctcacgcgcgccccgcacgcgcgcccgcctcacgcgcgccccgcacgcacatgacggcttggcttacctgtaatgggtgcgcttcgctttgcgttcctcgcttggccttgcgttcctagcttggcttggcgttagtcgctttgcctggtgtttcttgcttggattggcgttttctccctcgcattcctttgctgggcctgaatttttctctgctgggtttggcattcccttgactgggctgggtgtttccttcggagggggggcttggcctttcctggggtgggcctggggtccccctggtgggcgtgggctttccccgggtgggtgtgggttttccctgggtggggtgggctgggctcccttgctggggttggcaagttttggctgggattgacctttctcttcaaacagattggaaacccaaggtttcctgctagttggtgaaactggttggtagacgcgatctgttcgctactaccggcctcccctggctgttaaaagcagatggtggctgaggtttgttcaatgcccactgcctctactgtgaagaagccatttgatctcaggagcaagatgggcaagtggtgccaccaccgcttcccctgctgcagggggagcggcaagagcaacatgggcacttctggagaccacgacgactcctttatgaagatgctcaggagcaagatgggcaagtgttgccgccactgcttcccctgctgcagggggagcggcacgagcaacgtgggcacttctggagaccatgaaaactcctttatgaagatgctcaggagcaagatgggcaagtggtgctgtcactgcttcccctgctgcagggggagcggcaagagcaacgtgggcgcttggggagactacgaccacagcgccttcatggagccgaggtaccacatccgtcgagaagatctggacaagctccacagagctgcctggtggggtaaagtccccagaaaggatctcatcgtcatgctcagggacactgacatgaacaagagggacaaggaaaagaggtaaccgggcctgggatgggaggaggcaggacatggggggatgatggggacataccctcctggcgcagggagggaggagccaggctttctcttcctccgcaggccccacaccaccctgggtgtggaaacctcagagaggtcagggcccaggtccctttataaacagcgacacaaaaagttttagctgatttccaatccaattacaatttcccttatagaacactaatagactgttttaaagtgatttaactcgcaaaattaagtcgatgcagcagattatttttaatgtacacattttaaaacaatgttctgtacactatagaaaggtgtatattgagaactaagtcccataatatatcaacttctgggctaaatatctttcaaataaaatccaatatggattttatatcgatgtacccctatgtaaatacgttctttactgagtaaccttaaaaggaaactgaaatgggaagtatggttcatatctttgaataggaaggttcgtttttcttaagatgtgagctttttctgtgtttatcacttttacataagccaaataaaaatagcaaagtcttagtgtctttaaattgcacatgatgtattttatcattgtgataaattgattttttttaacagaatggaaaaagacttgcttttccagatatcaaaatgtgcatgtgttatttccacaaattgtttactaacagctgaaaagatataaatgaacagaacagaataggaaatccagaaatacccaaatatatgtaagaatttagcacttgataatggtgatgtttcatattggtaaaacaaggtgaattattcataaattaaatgcatgctgcttggagaaaactacctagatttttatgtcacaaaaataagttcctggagtatagattaaaaattttaaagatacaaaaggagaaaagtaccagaagaaaacacaaatgcctatttatatgtgaaaatatttatttatttttctgagacagactctcactccatagcccaggctggagtgcagtggtgcaatatcagctcactacaacctctggttcctggttcaagtaattctctgcctcagcctaccaagtagctgggattacaggcacccaccaccatgcctggctaattttttgtgttcttaatcaagacgggatttcaccatctttgccaggctggtcttgaactcctgtccttgtgatccacccacctcagcctcccaaagtgctgagattacagtcatgagccactgaaaccggcatatatatgcagatataataaaataagctcaatttaaaattgggcaaggtacttttttgcatgtctaccagtgacctgtgcacataggaaaacagcattcctgctaagagaaggaatttaagttagaagaggaatgaaagactattttctgtttaagttagaagaggaatgaaaggccagccatggtggctcatgcctgtaatcccagcactttgggaggccaaggcaagtggatcacgaggtcaggagtttgatactagcctggccagcatggtgaaacccgtttctactaaaaatacaaagaattagctgggcatggtggcatgcacctgtaatcctagctactcaggaggctgaggcaggagaattgcttgaaccagggagacggaggttgcagtgagctgagattgcaccactacactccagctgggtgatggagtgagactccatctcaaaaaaataaataaataaaaataaataaataaatataaaggaatgaaatactgttttctgtccacaaagtttgtgagggtgaagaacagtggtacttatatacttgctgaaagtttaagttgctgcgacttttcaaatagacactttgatggtaagaaccatatttttaaaatgtgtatgccttttacccatctattccattatactgaaatatctatatgaaacagacacagctgtttttcttagtattgcttaaaatagccatgtattgagaagaactcatataaagatgttataaacaaatttcagtgcatccataggatggaataatatgtaaccattgagggtgtcagtagatacagagatatgtcggcatgcaaagatgtactttgctatatcaagtgagaaaaaatcagtttgttatacatatacacaaacagaatctgctcttgtgttagctggaaatatgtggaaaatataatcaaacttatttctggggatttgtaagtgaagtttttccctttctcttatctgtgatttctgcaatgaacatctgaaaagttttagttaagtttcattagtaatgaaataatccttgggaagagaaggaatatgctacttgcatagatacaaataatttctcacattctgttatttatttttatacctgtggatggctatcttctgtgaacttttaccctcttcagaagtagagggcttctgtttacctcttctggtagattttattgtatatacattttattatatatagattaatgtgtaaatagtatggattaattattttagtttagttatatatttatgaaaactaaaatagcaaatataaatgatcgttactatcgcaaatgtattgctctactcaacaggagttttcttttaaaaatattgaacttccaacctatgtttatccattctttcaatccgtttagtcatcaaacataagccagacacctattatatggcaggcatattctgctatctctcaggatccttccacctttgaaaacttcatgtttacctgctgcgcctgagcaagctgagagaatcaaaattggggcattaggacttaatctcaattgaagcttttcctccctcctttcaaacaaaagcatttctgaaggtgacaaatagtaaaagataacccttaactgcccttttgaaaatttataaggcttgggtaaagactgttttagctgttttaagaacttaaatgtggtacataaacagcatggaatactatgtagccataaaagaaagaacaagagcctgtcctttgcagggacatggatggtgttgaaggccattatccttaacaaactaacataggaagagaaaaccaaatactgcatggtctctcttataggtgggagctaaatgaggagaacacacagacacctagagggaagcaacacacactggggcctatcagagggtggagggtgggaggaaggaaagaagcaggaaatagaactaacgggtactaggcttaacacctgggtaatgaaataatctgtacaaccaacccccttggcacacgtttacctatgttaaccaacctgcacatcctgcacctgtatccccgaatgtaaaagttgagaaaagctccacaaatagtttcataaatccattttaaaaagagaaaatttataacagtcttaaatcctaatatgaatgattggaaatatctgatgtacatacattgtataaatctaagtattgaaaaaaatgagcccatgctattcatttgaatttcaagttttctttggcttaaagtttttgaaaaccaaagtaagaaatagattattttagaaaattgtttttgttttcacctcagccctcttattccatagttcttttaaaaactaaaatttatctaaatgctagtcatctgactggaactgccccagacctgttatattataacatattctacttagtataaggcaccagggattgtatgatgccccattattttatgtctcactaagaaaattatttaaatgctgccaattataattatagtaaatcatgaattataagtggtatttcagtgtaagaaatgttaaaacatggagacaatgatcatcttagactcaataaaatacagtacaacgctacctgtaatctttaaaatgtacctgaaagtgtaggtataattgtatcgtttcacttaattcaaatgttgtctttagtggtattagtaaaaattataatatcttacaatttttgagctgttatttgtgttaggaactattctatattttgtgtagagtcttatttaagcattacagtggtttcctctgagaaactgactattttcattcccattttattgatgaggaaattgagacacaaaaaggctaagcaacagctaggaagtgacagagcttcaagtaggattccagcccaagttgaatgtcatccaagagctatgctctttctattcaaataggctgctctttcattaatacagtgagtaatgagaggtaataagtagtgtgctttcttcaaaggaaaattgagtttgttttgaaggcagagtaataggctattcagtgtttgcaactacatgaatcattaatgtggcattagctagtgaactacaatttcctcaagtcttctcactctcataggactgctctacatttggcctctgccaatggaaattcagaagtagtacaactcctgctggacagacgatgtcaacttaatgtccttgacaacaaaaaaaggacagctctgataaaggtatgcagtagtcaactatatcagcgtgagatgggtttgatttcaatagatagcataaaaatgagttttctcatttaaatataactagttggtgaaagctgtggaatgttattttgaattcctaggacttgtaatttgtttttggtctaatactgacaggccatacaatgccaggaagatgaatgtgtgttaatgttgctggaacatggcgctgatcgaaatattccagatgagtatggaaataccgctctacactatgctatctacaatgaagataaattaatggccaaagcactgctcttatatggtgctgatattgaatcaaaaaacaaggtatagatctaccaattttatcttcaaaatactgaaatgcattcgtgttaacattgacctgtgtaagggccagttttccgtatttggaagctcaagcataacctgaatgaaaatattttgaaatgacttaattatctaagactttattttaaatattgttacttttaaagaagcattagagggtacagatttttcagtgcacttgtggttagtgctttttttaaaaaaacactgaatttgtaaaaggtaatacttttttttttttcaatttttccctgccaagttttttttccctaatgaatgtaaaatgacaaaatttgccctggaaataggttttacattaaaactccaagaaaacttaaacatgtttcagtgaatagtaatcctgctactttggcaaattcctaaaaaaacactaatagatatgaggtgatgtatctctcagtggcaaggcttaagatatttctgattgctcatgaggcagaagtggaaagggaaaaatgcagcaatcagaaatatcaaggccaacttggaaattaggtaatgggggaaaagaccatgaagaggttgtgtgtgtgtgtgtgtgtgtgtgtgtgtgtgttgttactgttgttcattcatttgtttcctttatatggtgagacagggttcttttccattttagagaatgacagttttcagtttgggagagggagttagtgggttgtaaactgcctagagataaattttaggaggcctctgaggaaccagattggcagtgaatatgtggtaatgtattgggaacccttgagtagaaggaataacaagtaattaaccaacttagtatcctattctggtagaaatggccaattagagtctcaactctgctttcaattctagaatgtcttgatgggaaggtgggagataaggggcttataagtaaaaagatcaggttggattttgagtttactagaccttgttctactcttaccggggaaaattttgtggtgttttcagcaaatgaatctctctcctactctttcctctttttgaccaaatcctcaaatgataaagggaattgtttatgtggatgagagatgagactgaaataattgtctattgcactagcttccagctagagttgtgcattccagttacctcaggaaaatttttaaataatcttcaagtctaggttttcccctgaagattttgatagagtaagtctaataaagccgggatatgtatgtttaaaaatgtttccttgaagccaggcatggtggtgcatggctgtagtcccagctgctagggaggctgaggtgggaggattgcttgagcttaggagttctagtctagcctggtcaacataatgagaccctgtctctaacaacaacaacaacaaatttctcaaaatccggatacactcctgcttaaccactgaatacataagtgtaatatgtaaattcttatatctcagaaacttcagatatttctagaagagttggagttggatatgtgctaattcctttaaatctttcctttccaataacattaatctaaatttttgtttgtttgtttttgagatggggtctcactctgttccccaggctggagtgcagtggtgcggtcacagatcaccacagccttgacgtccctaagctctggtggtcctccaatctgtttttgtattttttttttaagtagagatgaggtttttgccgtgtttctcaggctgatcttgaactcctgggctcaagtgaatcacccacctcaggctcccaaaatgctaagattacaggtgtgagccaccattcttggcctagtctgacttatctctgtcgttgagacattaaaatgaatattattggcactatctatcagcttacagaataatagcttttcctttctaccatcagttattcactgccattcagaaggtctttagaaatttgcagtgagtagtcttccaataagtagaggatggctctctcaggactttgtgtccctttgttcactcattcaagtgcttaggtcagtaagtcgtttttaagagcagagttttctcagaattgtagcaaattctaaaccttttttgtcaattgaagctgtattatgggctatccagtatgtctcttaagtttgtagagctttggcttaatcaggatggcaggtttaaacactaaaaaccatggagttattaagaatacagataggaaatctcttagtttcagtaatcctatgaactgattatctatctagttaacaatctggaaaaattaaatacaaatagattttaaatgaataaatgttggaaaaattcttgaaatgggcagtgtattaatagcaatatttattgcacgttggagcttgaactttggtaaaacatgtgaaactaaagaaatattttacattcaaattcttgctttatacacaacaattttgtcttagggttggataatatagagataaaagatacagcccctgccctcaagaagctttttgtttaaatgaaaagaaaaatcatccaaaagtgccatgccaaatgctcgtttagaaacaaagagtcttggaaacagtaaatgtttaaggtgagtttttgagatgatcagatttaatgtggtgaggcagagaagggatgtttccaagggaaggagtggcatgtgggaaagtacagaagagtgagaaggaagcgaccaagttttatttactttctgtgagtgtaagtccataagcttccagttcagttgagaaatacataattttttgaattacatattgtttttgttttatattgttttacagtgtggcctcacaccacttttgcttggcgtacatgaacaaaaacagcaagtggtgaaatttttaatcaagaaaaaagctaatttaaatgtacttgatagatatggaaggtatggttatttcttttaatttgtgtgttgttctagattgatagcagtcactcaagtcataaataataaattaaaaagattaaattatacttattgggacatagtgatcagtatcaacacaaatcagttaagtagaaaagcaattatttggactgggcaacataaagaactgttttagtaggattcatcatctcttattatattgactgatgttatttgttgtatgatgtttttggttacatgatcttatgttagctaaagggatttcatattaattttatgaagtttgaactttaactttcagtttactttatgactcagtattgaacttcttaaccctttctagtaggttttaacctctgtatcttatatgcttttccactaaatatgctgtattaaacataaataggagttgaaaatccttttatcttttcaatgactctgctttaagttgctttctttgaagaatattaatgttagcttatccccacatgacaattaattgctattcccacatactgtgggttcaacagcttttttccttttttatttccagtgtattttgatgtttttatttttagttggtatggagagagggagtgaagatagttttaagtggatacacttttcctttaatgaaggcaagctgtaggtgggtgataaagagaaaagatgaaattggaaatcatcattctcagtaaactatcgcaagaacaaaaaaccaaacaccgcatattctcactcataggtgggaattgaacaatgcaatcacatggacacaagaaggggaatatcacactctggggactgtggtggggtggggggaggggggagggatagctttgggagatatacctaatgctagatgacgagttagtgggtgcagcgcaccagcatggcacatgtatacatatgtaactaacctgcacaatgtgcacatgtaccctaaaacttaaagtataataaaaaataaaaataaaaaacaaaacaaaaacaaaacaaaaactagctgggcatggaaaaaaaaaagagaaaagagctaggctttggattcacacaagactgggtttaattcctaactttcttacttgctacgcgtgtgacattgggaacgttatttaccacccaatatgttgtcatatgtgaaaagtaggagaatatatccttcaaagttggctgtgcataagcaagaaagatatatgtggcatttaattcagtgcgtagcacatgcttattggcagcattaactgaaactcctgtgactactattcttaccattattattaatattactgctttcagcatgcagagagctcttatttttcttaccccctagctaattttctattacagcatatcagtttagggaagctgtgacaaaatcttcacttaaatctttgtccacttcagataagtggccctagcattgtttcttgcccatcaaaggactttaaattagtagcttctgctatgcaataccccactgagataagaggtttcctttttgtcctttccttttaaccttggtggtattttacaaagatgaactcttgagcacccaagatgcttctgtcttttagtgcatgtaaatgtttgattctgcatggacaggcaagatgttaaattggtaaagtatatcaaattagcttttaaaataactttattacagttcctaaaggagaaattatctctgtaattttagaactgccctcatacttgctgtatgttgtggatcagcaagtatagtcaatcttctacttgagcaaaatgttgatgtatcttctcaagatctatctggacagacggccagagagtatgctgtttctagtcatcatcatgtgtaagtgtttacatgaaaaggctagttaatgctaaattgaggtttaaaataattataacaattgcatcttacatatcaggtgagatgtcatagtttggttcaggtagttttagattggccgtgagttagtcccctgcatcagccagaaatcagacaaaaagcaagacaagttagaagtaccaatgggtgcaggattctttacctcaggacttttaagacctttatccttagagatcccaatattgttcatttcatccaagtataacacctatgcatgggataaaaaagagtatcacatctttgatttttctgattagttatttgggtcttgaaatgtccagtttagcagaaagtcttgtactgtcttctggggactatcttctacatactccttgaatttttcaagaaccaaaggggttcactaaatccaaggaagacagtcccttttatcaagtcagaaggaggagaaaaaaaaggacattccaatcattctgttgtttccattgtttctgttgctgcattgttgccactcaaactggttctgctgcctggtaattgttgacctttgacaccaagatgcccttactgattcagatccctcaagtcttcatggggattcatacagtgactttgaagttacaacatttttttttagttcccttacctatgcttatatgctcagccattgttcccaaagcaccagcaccctgctctggccgctgggcatcctgactttatccgcacacaaagtgagcaaattgacccttcctcctgtattcagaacctaatgtggaacccacatcttagccaagaattagctgagaccttcatggtaagagatcctttgaggccgttgttggtcttttctctagcagatattaggtgggcttgttctaaagggtcagaggggttcaaataatgtggcagaaagagatcagtgtttgtttcttcttctttgctaccagatctatactgtgaggcacctttatatcctgtgtagaaccttaggcagtagaaagtcccatatgagccttccccaagcagtggctcccagctgtggttggccccttgagtgatctgatttacatgataatgaaaatcgtccaagctacttccatctctagctcaagattttaaaatattatcaaattgtacctcacaggaagccattgaagagaattctcagaatctcaagtaggttaagtaagtagtgatgagtcacggacaagagccaagccttgtccatgactcgtcacaaatcatgtgtaaaagtagggctttgtgcctgctttggcggcacatatcctaaaattggaacaatacagagaaagttagcatggcttctgcataaggaggcagcacaactctttgaggcattccatattttgtgcagtcactggaagatcatttcactatctgctgactagctctaaggaaacagtgtgaatcaaagcaaaatgggtgccaccaaaatatcgaaatgtgatttgtgctgcaaaaatagtcatggaagatggtctgtgagatgatttagagctgaataatgtgttcggtgcaaaatatattaagtatgtatgtcaaaaattagagaatgtcaatttgcagcttcttcatgaaaactgaaaaaaaataaaagtagagttttggtctcccatgtcagctggaattgaacatcaatataaagcattatcctaacaaacatctgctggctcagagtttgagtctgtagagaaggatcattgctccaagccaggtcttaacatccattggtttttctgcccttagcacaacaaattggtcaactccgtaatagtggacaatcacattatctactttaatgagagatttatgaaaaaatttagttacaaactatgacacagttgagatgccctgaattataagccataaggagtaggacaactaagaagcaaaattaggacttaataacattttctgaaaactacagcatttgcatattagaacctgtgaacaaaatacacatggggttttatttgggattccaagataattttagtcataaagtttaggaacagattattccattgctttactatttctctgagcatttaaaaaatgttaccttgttaaatatttgtaacaacctagtgaaataaggcagcaaagtcctcactttgtagaagaagacattgagcctaagagaagaaatttgtccaagaactaatagctgttcattatggagctaggacttatgcagagttgggacactttctattatgtcatgctaatgcatgctgatttactgggtcacagtgtccttgatttatgagcatttcacctaattttttttcttctttaattagaagcttaaagaaaagtttgtagaatgtactcataagtgtatgggataatactgttaaattctgatattatgaaattgtttgaaatactctaagaattttacatttggtaagtattttttatatcagtattaaaatagtaatttggtttattacatttttatacatagaatttgtgaattactttctgactataaagaaaaacagatgctaaaaatctcttctgaaaacagcaatccaggtaagacttgtgataatgaattactttaggtcagttgtccacaatgttttgggcagcagggaccagttttctggaagacagtctttccatgggctgggggaaggtggggatggtttcaggattattcagccatgtttcatttattgtgctactttatattattattacattgtaatatataatgaaataattatacaacttaccataatgtagaatccgtggaaactctgagcttatttttctgcaactagatggtctcatctgggggcaaagtgagacagtgacatatcatcaggcattagattctcatatgaagcacacaacctagatccctcagatgagcagttcacaacagggttcatgctccaatgagtatctagtgctatcactgatctgactggaggcagagttcaggcggtaatatgagccatggggtgtggctgtaagtacaggtgaagcttccctggtttgcctgctgctcacctcctcctgtgtggtgtggttcataatagtccatggagtggtaccagtctgtgacctgggagttgtgggcccctgctctaggtggtcctaccgtagataaataaataaaagtaaggaatttttgatcacaaaagaacgccaaagcacaagtcatgttacatatccttgtcccaacaaggtctcactcttactgacttcattcctcctcatttgaagttggaaagagatacatttactttgttggaacaagatgtgttcttctacctgctggtcaattgtcttgataacagtaattttgttagaacaagatgctctgctaccatttaccaaaagattgtcataataaatatacaaattgcccaattctaggctcagcagattataataaaagtagaaaaatgtttcacattaacaaaaatactagtatgccacctggttgtggacacctaatacattgtataacccaaactgtattaggacacctttaatttagccatctatttatcaaaaagcttctgtaagttaggttttataagttgcaggagacaaagatggaatagatgtagttttgatctttaaggtgctcatagtagagctgtctctatttcatttctgtgctttttcaacagaatttacaaagaaaacctttctatgttttcacttgtccacttaacaaataactattaaatgtcttttagatactaatcatttttctaatgttacagaacacacacaattaaaaatacagacaggagcttgttattatcattgtcatttttattattttactactttattcagtgcttactgtgtgctagatgcccactggaagcttataattatgatttattatatattaattatgtgccagacgtatgtgatgaggaatgaaagttttgaaaaaaagtaggtatgattcaaggtaagcacgcagagtgagaagaatttttctaggtaaagaagcagaagaataatgtttggcagaaggaacacgcaacaagattgtgtgtttgccagaagaacatctaatgagattgcctgtttggcaggaagagcagcaagtgcaaaacacaagatgctgagtgaactttgcagggtttctgagcagttcacttttgctagtaccaaaagtgtgagacaccagaggttgggaataaggtgaatacttagctaaggcaagtttatgatagacttttttaatactatagaaatgagtaggtcttaccctgtgggccatgggaaatttaccaggtacaatgctttggactgtaaatactagatgagcagtggctaaaacagtaggaaccagagttgttttggttgttcagtgatatcctaggatcccacttgtccctctttcagctgtgctgttggcagtgttttattcatgtctcctttcatggttggctaatcctcagcagctccaaacatcttgttctcacaacacaacatttcaagggctgcttttcttcacatgtgtcttttaaacagggagaaaacttagaagcatgcaaggggcttcctgtaacatttcactggctgggtcacaccacatgctcattcccaaaccaggcactgggaaggcaaatacatgattagcttagaataaacatttctctttctgaggctgaggagggggattgggataataaatatcccaatagacttgtgtttcttctgcaagaaagaataaggaatggctattgatagggagccaacaatgtgtgctgcaggggctcattggagaaatttgagcaggggagttacaagattaaatttgagtattaaggcatattctgcttatggtgtaaaatgggttagcaagctttttctgtaaaggaccaggtgggaaatattttagattatgtggtctctgtcatatctacttaaccaggctgttgtctgttgttgtagtgtgaaagccaccatgattatatgtaagcaaacaggcatgactgagctcctataaaactttatttacaaagccaaaaggcagattggatttggcctgtggcctatagtttgctgggattgatggaagataaccatgtaaagaaaccaggagaaaaaggaagcttttgcagtagtcagctatagtttccatgtcacacatccttggactagtatcaatgtattctaaggttttcacctgcccatggcaaaataaagtttggaatctcagttactcattttaatgtgttggcctttttttggtgttatgcttttttcatttgttttgcttaatttttttcatgtaagaaataacattaatagttggaagggttgtttgtaataaaagccgttttgtaaatgtttatgttctcagtggcagtggtaatataaagcagaggaagaagagaggtatagtcaatatgatttagtgataattgaatgagaaaggtttgggggacagagagaaatgtcagataatttacaggtttccacgttgtacactagtatttaacctggacatgaggaaggagtaggaaattttctccatgacctgtgtgagtcacagcttccagaaaagaaagagagcaaggagcatattaaggaaccacagcaaagtcagtcctagagtgccctgcttgacttcatgtcatagttctgacttctaaaaaatcattttctgcaaaatgtgctttgtgtttttcccctcttgcagcctgcagccaaacagaatccctttagcagggcatttttgtgttcttcctttaaacaaagtaacataaaaataacaaaaaagagtaagagaaagagtgttttttgtataggctagcatttaacttaaacttgagagcgagtactaggattatacttagaatttatggactcggtaggaagactagatagaaatctaaatattgctgactcaaacacagtgtgttttttttgctttattgtcacagctctgaattcacaactattagttatattcatatacactataactttataaagcaccttcccaaacaaatattaagtgatttattataatttctatgacttattatagaattgactttccaagtgttcatgagaattattgagaatttgctacatagtatcatctcagctgtgtccacatgagctagctgtcaccttgtcttaatgaataatggctcactaggaatattggttttgacattaaaatgatctacatctaaatacagataggaccagggaccactcttgaacgttaatgtctaagcatcttaaaagtacacataaggctttcataatctgacttctgccctactctacatctttagcccttttccctgtgtgccctttctctggcattactgagtggctcttaatgccctactcactcctccttctattgcaggcaaatactttcactctttcaggcctcgctcctgctcttgctgctgtgtggcatgctgtcaccctttcttgccctctaccacttttaatctagctagcctcaatatttaagtctctgcttgggcaggtgttctagaaaagccatccctgacaggctttattttcattctttttaaaccctaacacctagcatgtgtgtagcaggactcaataagaaatttctgagtaaaataaagactgtttttacaaagatgatgtgcaagactgtcctctgcagtcttggagtagaggggacagacctgtggaggaataatgtacagttcaggtggtaaaggtgcagtagaaaaatcagtgaggtcctaaggctacctcaagaaaggagttacctgtttatctggggaaagatctgcagaatcaaggaagacttcccatagcattgttttaaaagatgaaaataaggctgggtgtggtggctcacacctgtaattgcagcattttgggaggctggagcaggtggatcacaaggtcaaaagatcaggaccatcctggccaatggtgaaaccccatctctactaaaaatacaaaaattagctgggcatgatggtgtgtgcctgtaatcccagcttctcaggagaatgagacagaagaatcatttgaaccagggagtcagaggttgcagtgagctgagattgtgccaccgcactccagcctggtgacagagcaagaccctggctcaaacaaaaaaacaaaaaaaaaaaagaaaaatgaatataaatttgtcataatagtggatggaaacattttagacgttaagaagacattgtacactaacaaaggtgtcagtagtaattttggaaatcatttgtaaggtactattgttgcagaaaacaggaggcaggagagacccagtgggtcaaacaagaggattttatttaggtgcacaccagctcagcggatttgcatcaaaaacctgagccctgaacaaagacagggcttggcttatataggcaaacttacagaagcagaacaaaggcagttaatcatatagtgacagttttgcaaccactgcatagcttgtgaccttgcagctgcattgaaggaaaacaagaatttgcaaaatatatgcatttgtaaaaatagctatgaataaatgctgagggggaggggagatggtaaaggaatttgttttcttaacttttctctgggatgtctggagcccatacctgtgggctctggcttctcagacagggtcaccacgacctttcctgggccctgcctgatactatccttagagtcagagtagctaagtgcaggaaaacttgtttctctttaaaactaaattttcttttctttacatttcctgcttcaccattaggaagtgaacaacatactgagttaccttatatgtttctactgtattttaaagttgtgtttctggtggttttgttcatttatgtggggtggatgaatttgtgagtgaatcacatcaggtgtctccccaagtggtttgttgaagttttggagaattatttcctaagtaactatttcatgaaagactaaacactcaattaatgaaataaaataaaatgttgtcttcaatctatttttataaaggcaatagtttttaactgttctaagtggttcatcttaactgaatatatggatttctcaacagaacaagacttaaagctgacatcagaggaagagtcacaaaggcttaaagtcagtgaaaatagccagccagaggcatggaaaattttaaatttaaatttttgatttaatgttgttttctttgctttaacaatattagatagtccaaatgaaattacctttcagactaggttttaagaatcaatagattctttttttaagaattttttaataagattcttaaaatttattttaataaattcagcaatctcattaacagaagaatcaataaattctaatttaacatttgatatttagcttaaaaacataaccactataaaatttaaaatacccttattttacagtattcttatttaaaatattcttgtctgcctttttgattagcttatagctaatctttccttttggaatagaggcaaaaacatattccagacctttgtttgttcttttattttaacaacaccctaacatgataaagtaacatcaattattggattatattattaagcaaaagaactatgaacaatgtaacactgaaggtccctgagctggattcatggttaaagaataatcacggccagtgattgaaaatctgcagttttatattgtcagtcactgataccaaggttaaagacatattctgccttgtgatctctcactgacttcagcatttctgttcagggagggaaccaggtcataaaagcaacccaactgcctattacaagaatcatatcttgcagaatgggacatttggtgttagtgcacaaacacaataaccttttccttattttagttgcagaaaatcagtacagattattaaaaaaaatttatccactataattagtacaccttagaatatattagaactggacttaagcagatcatctagatacataacactatcatattacagcatataatttcaattaaaatgtaagaatttgcatttctttctgtttggtgttgatttcagctcctaataatttaaagcgtgcctacaatccaattaggaatcttttaaaaaagcacttcagtgcactataggggctcactagttagggtttcatgagatatactttttcaagtgaggaagcctttggaacactacaaatcatctgctaattcatttttggtagatttaacacataacaaattaagtttagtccaaacaaatggtaacaaagttaagtttgctggttcatgtttttattctccctttgtctgaggtgaattatttttcacatgttagtcagaagccaatgatgtggcagttgctaaacatagattaaaaaattaattcttaattttaattatttatttatttaattattttaacagttaaattttattttattttctaatttttcatgtccatacttgattacttaagaataaaattattttaacatgcattccaaaagaggagacatacacggaaatacaacaagcaaattaaccttctatttttgcatctgcagaaaatgtctcaagaaccagaaataaataaggactgtgatagagaggtatacctttatgttcaaatgtttctgttgaattagatttttatgttatgctgtttaacaaagtgtagtaagtgtaggcatacatgatcctatcatgtaagtagcataaatcaccagtgaaaaatttaatatttaactcagaaagaattctgtacattgagttttcaagagatacaaaccctagagagattctttcattattatggaacaatcctgaatggtgccataaaatgctaggtaatgccactttaggagctttggaccaatcattttatctttcttggttttagtctgattatcactagataatgtggctaaagaagataattacttattctttgtaacttccagctggaaaattgtatagctattgaatgtgaaattttgggagcatctaattttctggaattccacgcttgcacttcagcagtttcactctgctccttgtgttgtggcaaactttggttttcatgtttcagtgagcaccatcatgtttttgatatccaggaaccaaacgaaaaaagaacgatcaaaggcagtgggggaggagaatatcttagtgcagaaaagggccatcttcctttctattcctgaagtcccccagtgtctcatcctctacatctgagtgtttaatgtaaaatctaggtggtaaagatagaagacacattttgtgtctatgtcgttttatttttgtgttcccacgagtcaaatggggtaaattcatatataagattctgaagagtttttgggaataaaggcacaaaatgaaggagggccctttttgaattttggaaaattctgttttattcagtcaaacagcaatcaagcaaactttacaaaaatttcaatgatatactaatgacatgataattacatcttaaaattatacggtaatagttctgtatatatgatcaaatttaagtgtgagatttttaatgactaaaataatggcaaactgaatcaattgataaaatcaattaaaaaggttatttttattcaataaagtgataaccatccttaatatcaaacttccactcaaggttgaagaagaaataaagaagcatggaagtaatcctgtgggattaccagaaaacctgactaatggtgccagtgctggcaatggtgatgatggattaattccacaaaggaggagcagaaaacctgaaaatcagcaatttcctgacactgagaatgaagagtatcacaggtaagcctatggcaacatttaataggagataactatatgctgtcaaactaatcttaatttgggctaatattcatgatgaacaaattttatacttttactagaatattcagccttgcctgttaatcagaaaaatgaaaatcagtaaacaatgagttaccgttttttccagtcattaatttatttgaaaaataaccagcattggcaaatgtgagggaaaaggcattttcttttctttttaatgaacttttattttagcttcagaagttcatgtgcaggtttattatataggtaaactgtatcatggaggtttggactacagattatttcatcagccacataataagcaaaatactcgagaggtagttttttggtcatctccctcctgccacactccaccctcaagtagaccctggtgtctgttattctcctctttgtgtccatgagttctcattgtttagttcccactaatgagtaagaatatgtggcatttgattttctgttcctgcattagtttgcttaggataatggcctccagctccatgtgtgttgctgcaaaggaaatggtctcattgaaaaagacatttcatacactgttggtaaatacattttgaacattaatttagtagcatattcacacacacatatatataacatagtaaggatatataggtatgttaaggatatttgtatagatttgtcacatatatacttatgtgtaaggacatttcttacagcattattatatcaaaaagatagatccttatcaataggaatttatcatcaaaagtaaatccttaccaataggaaataccccgaaaataatacagtatgcaaccattttttacaaatgaggttagatctagagtatactgattattcacaattaaaatatttaaagcatttagtttggtaacacatcttaagataattttgttagaattcttgtaatatctgctgtgttgcaaatggaagctacacgctacattgacaccgtaccttgttagcaacaagattgctagttattaaatttttgttgtcagtgcctgagtgccgaaatattggaccttcaatctgaatattgccaagggattgtacatggggatctatatttaatataaacatttgagtatattgggtaaaacttttattaaaatatatcaaagtatctttcatctgctaaaccaggagctggccagctttttctgcaaagagccatttagtaaatatttcaggctttgtggactatatatatttattttttttgagacagggtctctgttgcccaggctggagtgcaattgtgtgatcacagctcactgcagccttgactttctgggctctagtaatcctcccacctcagcctttctactgtctgggaccccaagtgtgcaacatcacacccagctaattgactctatggactgtaatgtgaataagcatggctgtgttccaagattctttacttacaaaaacaggcagtgggctggatttggcccacaggtgctaatttgctgacccgtgtgctaaaaggaaggtgctgctaatgcagtaacacttatttgtaaaagtgccctgcatgtgtgacattatctttcctttgagaaaaggatatatttcagtattcacctcaccatatttttccacagtgatgtcatataatttttaaaatttcatttgtaaaataagattattttctgcatttctgccactttattcctgtcaatagaactcagtatttcactgtgatcaattactttgtatatttgatgagtatcaactgtcctagaattggctgatttttatcaagcaagaaatactctccttgaagcttttagtttttcttggtctttatgtataagcatgaacaaaataataatcagcttctgtaatctagaaatggtcaaggcaacttttagttctatagttttaagaatttaacaccttggtctggcatttttaatgccaaatgtgtataatttttataagctttaaaatatgtaattgttatataaaatttgaaaactacacctgttatgtaaaatttgaaactatttgtctactacttttccatgactgtggaagaaaattacaacattctcagccatgactcctaagtatgatgtccttaaaagaactgtctacactcacgaactcaaattttcttttcattcactcttgatctcatgccagtaagtcttcaatttcagcagtcctccaacgtttttcctcaaaattatcactaatttttttctgtaatctaggcacttttcttccacctcattttatttaatctgtcagcaatatttgaggcaatggaggacatctcctccctaacggcgtcttcacttggctttcaggacctcactgcctcaggcttttcctcctacctttctagtccattcatcatgttctgttttgcttgctcctcctcatctttctccttttggacattgttgtttcccagggctcactcctcaatcttctttcttgtgactttttctttttcttttttggagacagagttttgctctgtcacccaggctggagttcagtggtgtgatctcggctcactacaacctctgcctcctgggttcaagcgattctcctgcttcagcctcctgagtagctggcattacaggtgcatgccaccatgctcagctgatttttgtatttttagtagacacagcatttccccatgttggccagcctggtctcaaactcctgacctcaggtgatctgtctgccttggcctcacaaagtgttgggattacaggtgtgagccactgcacctggcccctcatgactttttctactgtgtatatgctagtgatttccaaatgtatgtctccagctcagatctctctccttaattccagatttctatatcagcctgcctacttgtgacatctctatttggttagttattgggtatcacacacttgtcagatccaaaattgggctactgatgtccttcctgaaatctacacctcatgcagtctttcctactttggttaagggcaactcttccagttgctctgccaaaaatctcggtgtcattcttgactcatctctctctctctctctgacacctcacatctaatctctcagtaaatcttgtcaggtctacctgaagaatatgtccagaagccagtcatatctcatacatctgagccaccctcatctgcagtctagatgagtgccatagactgggaattgatagtcctggtttttaaaaacttcccttttcatcaattcttaactcagtggatgtatttaaagcataagtcaaattgtgtcattcctctgccccagcccttctgattatctcccatttcactcagagtacatgtcaaagttcctcctaattatctcccttgctctgcttcagccacactgaattcttgccatcccttatctacccctagtgcttaaagatgccaggcacacctctgtgatttgcagttccctgtgtctggaatgctttttccccagatatcctcctagctttctctttccattccttcagttctttatttaaaaccccctttctaagaagaagaggaaaaagggtaaaaagaaacacattaaggaacaaccactttctgaggaagaacggtgtgctacccagacgcgtcatgcttaaggttcaattgggtgcctaccagggatgctctctaacgtaacgaagggaaggttcagtgaaacaaagtgatttatcatctctaacttcaaacccatttgtatcttgacatcaacgctgttaaccttatgtcatcatttcttagagactttgatatacaaataaaaggtttttgtattagaaaaaaaaaatcccctttctcagcagggacttttctgaccatcccaactttcccaccaccctccccatcaaacacataaacatttcattttcctgctttagtttttctcctgtaacatcctgtatattttgccttatctgtctgttgttattgtgtgtttttctcactctcatgaatagggtttttatttttcactaccatatcctcactgcctagaaaaaggcctagcatattggatgaagctacctaacaaatacttattaaatgagtgaagggagtttatcctggatatattgtttgattaattctcactttaaaaatgtttgacgtggttcattctaacagttttgcccagtaattacatgcatttttaaaattgttttggctttttataataagctacattctttatattaatttttttatttagagagaaaagcccaatattgtggttattcactatttattcttttactagtaatcataattgtaattatggcaaactgagtcagaggaattgcaaagtttactggtattttattttattttgagatggagtctcgctgtatcccccaggctggagttcagtggtatgatctcagttcactgcaacctccaccttctggttcatgcatttctcctccctcagcctcccaaggagctgggattatgggggcatgccaccacgcccagctaatatttgtatttttaataaagatggggtttcaccccattggtcaggctggtctcgaactctgtacctcaggtgatccacccacttcggcctttcaaagtgctgggattacaggcatgagccaccgcacctggccactagtattttatttaaaaaaaaaattagggtggcacatttaatggacttacaaattcttttcaagggattatgaacctttggtatttgaaataaagagacagagttggaattttttgcttcctatagtaagaggaatactggtcaggcactgtctattctgatggagcaggtgctgctgcatggctgtatttcagaagcaagctgctcacattgatattggttggtgagcaagagcagtggtcattgattgactagatttcaaactggctttgtgtggcttcttgttaccattggtacaagtcatttctttcctaagttagagtcaactttaaccgaaaattttctgtataaaagttgccttcaattaactatgttcaaaatgaaactattttatattccagaattgtagacttcattttaaaattttggtcaagatgaattggttaataacagctctcaggaatatctgttttcttttttaaaaaatacatatttctctgtataatttattccttaaaattaattattttctttctgtttttggtatttttagaagcttttgctcaagtcctaacataatctccagtaggagattttagtctctttgtcagttcatgtatgtatatggtagtgatactctactctctttttaaattccttttcttgttcactttcttctcagtacaataacggtgatattcttatacatctttacctcatttaaaagtaattacagtttgctgctggcaaattcagctttttatatttttactaaatactaggctaaaagtgaagaaaatttaccaggtcattttattttcaaacaaaatcattactaataaaaattgctatctttgaaatataaataatgacattttgatattttaaaagtaaggatacaccccccccccaatagtttggctttgtgtttccacccaaatctcgtgtcaaattgtaattcccaggtgttgagagaaagaccagctgggaggtattggatcatggggtcggtttcctccatgctgttctcgtgatagtgagttctcacaagagcagataattctataatgggctctttccctttcacttctctctctcctgccaccttttgaagaagttgcctgcttcccctttacgttctgccatgattgtaagtttcctgaggccttcccagccatgtgtaactgtgaatcaattaagcctctttcctttatgaattacccagtctcaggtatatatatatatttttttttttttttctttattccactcatcagttggtggacactggctgataacatatctttgcatatgtgaattgtgctgcagtaaacatatgtatataggtgtctttttgagagtatgatttcttttattttgggtaggtatccagaaatgagaacgctggatagaatggtaagatctactttaaaagaactctccataatgttttccatagatttgtactaatttgtatccccaccagcagtgtataactcttttttcaccacatccacaccaacatctgctgttttttttattttagtagtgaccattctggctgaagtgaggtgatatctcactgttgttttattgtacatttccctgatgattagtaatatttagcatgtttttatattcttgttcaccatttgtacatcttcttttgagcaatgtctattcatgtcatgtgcccactttttaatggaattatttgtatttttcctgctgatttgtttgagtttctggtaggttatggacattaatcctttgttagattcataatttgcccatattttccccattgtataggttgttggctcactttgatgattatttcttttgctgtgctgaagctttttactttaattaggtctttatttatttatttatttatttttatttttgttgcttttgctttcagggtcctcatcataaattatttgcctaggctgatgtcttcaggtcttaggtttaggccattaatccatcttgaattaatttttttacatggtgagagatagagatccaattttattcttctatatgtgactatctttttttcccagcaccatttgttgaataacgtgtgctttctccagtgtatgtttttgtatcctttctcaaagatcatttggttgtaagtggccttttttctgagttgtctattctgttccattgatctgtgtatctacttttatatcagtaccacgatgtttgttactgtggccttagagtataatttgaagtcaggtaatgtgatgccaacatgtttgttccttttgcttggcatgtctgttgctattcaggctcttttgtggttctacatgaatggcagctttttaaaataactctgtgaagaatgacattggtactttggtagaaactgtattgactctgtagactactttgggcactatggcattttcacaatatcaatgctttcagtccaggaacatagaatgtatgttcatttatttgtatcatctgtgattttcttcagtggtgttttccagttatcctttgatagatcactcacctccttcattaagtatattcctaggtattttactgttttgcagccattgtaaaaagaattggattcttgatatgactctcagcttggttgtagttggtgtatagtggtactattcattggtatttgtatattttgtaacctctgagactttactaaattcatttatcaaatctaggagtgttttgtaggagtctgtagggttttctaggcataagatcatatcattggtgaagagagagtttgactttctcttttccaatttggatgccctttatttctcttgcccaattgctctgcctagggcttcccagttttcttcttaatatgcatgaaataaaagtaaaattgaaagcgattgttgatcagtttatttcacatttctctctcatacacaaataaaatgaattcaaagttctatgttaaaaacacaatattagagcctgtcttgttccaaagggaatttctaagttgtctatagattacagaggaatcaagaatataagtggaaactgtttccaaaaaataaacataaaaagtttaggttaacacaggggtttccaatccccaggccacagaccagtaccagtccctggcctgttaggacctgggccacacagcaagaggttagtggtagggagcaagtgaagcttcatctgtttacagccactctctgtcactcacattaccttctgagctcctcctcctgtcagatcagcggtgacattagattgtcataggagtgtgacttgaaccctattgcaagctgctcatgcatgggatataggttgttcactccttatgagaatctattgctttctgatctgtcaccatctcctgtcacccctagatgagaccatctagttgcaggaaaacaagctgagggctcccactgattctacatgatggcgagttatataattatttcattatatattagtaataatagaaatgaagtgcacaatgtatgtaatgtgcttgaatcatcctggaaccatcccccacctcaggtccatggaaaaattatcttccacaaaactagtccctggtgccaacatgactgtgagagcaggtttaacagatgtgaaacccctttgtcttgtcttggattaatgtgcagatatacattgtgtgaatgacatctgatggtgccatcttgccctgtagatcattttagggacacctccagtatttcatgaaaattaaattttcttctagtgatgaacaaaatgatacccggaaacaactttctgaagaacagaacactggaatatcacaagatgagattctgactaataaacaaaagcagatagaagtggctgaacagaaaatgaattctgaggtattttctttagtcattttcaaatgttttcatatgtgtatatatttttaaaaagctttattttggaaggtataaaggatttttaaatcacatatatacacacgtgtgtgtgtgtgtatatatatgtgtgtgtgtatatatatacacacacacacacacacaccctgtatatccttggtcatatatttatatatgtacatataggataaaaccatgttcttaattcaactgcatttgcctgcaacagtcgagtagtgaccttcacaatggcctcaatccaaaggaaaagcatttgatatttttcataagaattgattatctttccaatatcaaaaataagttttgctactaacaacagatttgctagttttgggacattagttctttttaaaatattaatagagaagtcagtttgttattttcactaacaggaaagtaggaaatgtacagctgggtcagaggccacattgtggatgtcattatccttgcttttgaggagaggaacagtttgctccgagtagtttctcatttcaatgcaaagagctttgaaaacaatgacatgccatgatacacatttagtgataatttattgataagtattttgttcccagatgaatagttcagtatgtttcccctatttcacacttactactacaatgtttcaaacattataaagaggaaagaaaagttattgcaatggcaaataatctcatgatttctaagaaaagccttgtaagttatatcttatttaccatttgtattttgaaataaaaggtttcttttatatttatatatttacaccacagaagcaactgtgattttgtggaggatcactagcagtagcatcagaagacctggcaaaaatcctgcacgttgcatatatacgtgtgtgtgtgtgtgtgtgtgtgtgtgtttgtgtgtgtgtattctagatggagtcttgcactgtcacccacgctggagtgcagtggcacaaactcagttcactgcaacctctgcctcccaggttcacacgattctcctgcctcagcctcctgaagtgctgggattacaggtgtgagccactggtcctggctgcatatattttttgacctctccttttaagaatcgtgatcctaaatgagttgagtgttgtatgtagaagtgcaatgcttagatgcagatgtgtacattgtagaagggtacaatgcttagatttaacagttatgaataaatgtaatgcttacaactgactgtaaaaatattagaaaagcagtatattgataaaacattcctcagaaaaaggaacttaaagaactttgaggaattgcttctgtcctaatatatgcatagctaaggctcttatgatggtgtggtttataggttagatatcagagtgtaaacccaatttaaaaaatgtagccaaatatattaatcttctattttatgcctctgggttttttgtaattcagagaaaggcttttccaattctgaaattcttaaaaatcctctagtgatttatttttcatggtctttagataaatatttcaactttttggaatttacactcttttagatttgaagttttgtccaacttttttccagttaaatatccactatgggaattatttcattatacaaatataaatgtcattctttaattttagaagaaatcatgatatgtcattctattgagtgctaactaaaagttccctttgtttacttagctttctcttagtcataagaaagaagaagatctcttgcgtgaaaacagcgtgttgcaggaagaaattgccatgctaagactggaactagatgaaacaaaacatcagaaccagctaagggaaaataaaattttggaggaaattgaaagtgtgaaagaaaagactgataaacttctaagggctatgcaattgaatgaagaagcattaacgaaaaccaatatttaagtacagtggacagcttaggattttgacaactgagaatgctcagttctgaactggagagtgtaagacacagctaggaaacactggaaatggaaattcaatcatgtcattgtagactgactactgctctacatgattgtgatcaaagtcagatagctgaaagggacttctttccagagaacaaacatgaacaggtttatttacaggagaaaatgaattctcatatatctcacctaaaagataacagtgagattctttctgaacaactctaacgctgacagtaaaattaacaacctaaaaattaagctccatcacacaggataaattctgagagaaaagatgaggcaggccaccatctttcctgtttgggcaacttagccattccagcgtgcgggctttggagagtacaaacccaccaggggcagaagagatcctgtggcatagcacagctgctttaccaaatcatggccagaatgcttctgtaagcaggcccctgatcctgttccttgtcactggacaggatctcccacctgaggcctccagctacacccaccagtgttccctggccaatggagatttgaaaccttcctgggacagagttcccagagagaggggtgggccatgacctttgttgtttgggcaactagcccttctggcctgtgggctttggagagcccaagctgaccaggggtggaagtggtacctcagcacagaacagccaccctgcgaaaacgtggccagattcttgtttaagccagtccccaaccacatttctaatcactggctggagcctttcaaccagggtctccagccaccttcactgctgttctctggctgacagaggtttcaggcctcctgagtgagagctcccagggggaggaccagactgtcatctttgctgtttggatgactcagccagttcagtcttagagtttcagagtgtctgaggagaccaggggctgaagtgaaccccccgcacagcatagccactctacaaaaacgtggccagacttcttttttaaacaagtccctattcctgttcctccttactaggcaagacttctcaacttgcttccagtcacatcctacaggtgtgttcagattggcaacaggttcatacctcagaggtacagagctcccagagggaagggcaggttatcgtctttgctttttcgcaggcttcactgctgataccttcagccactggaaaatacgaggcaattggcgactggagtggacccccagcataccacggcagccccacagaaaagtggccagactgttatgtgggtgcccatttccatatctcctcgatgggcaggtcttcctggcctgggtctccagccagccccccacttgagctttcaagccagtagcaactcagcaactccctggacagagcttccaggagcaacagaaatcctctctgccactgcctctgcagtggaactgcccttgctaccctcagaatatcaagggagcaaagaccctaagtaccatattgacacctccaacaagctgcagttgacacaaggaacaagtcagtccatcttccacaggtacaacacaccccttactgctcatcaccagacaaggaaccctggcttgggcccacaacacagaccctccatcctggggtgattacattaagtaactgctaacttacacctctctggggtggagcccccaggagacaaggaaagtggtggagcagcaagtcagctgatgtggagcccggagggcagggacagctatgtctctaggctccacttgctcttatgagacactttatcccagcactttaggagtgctgaggtcagaccagccccatctcacatgcaggattgcccagcacagatcaggtctaagagttctcttcgtaaaaaaggggacttgcttaaaaaagaagtctggccacgtttgtgtagagcagttgtgctgtgctgaggattcacttttgagagagttctcctctgagacctgatctgtgctgggcagtcttgcacatgagatggggctggtctgacctcagcaccccttagtctgcttgcctctcccaggaccccagccaggccacacctgcttagagggcactttcgggtgcccacaccatagcttctgtacaagcggaccatgcctgatcaatggagagctgcagcaaggtgacctctacagccacgcactagcctgcacattacctctccatactgcagccctttatatggaaacttcctacatcactttgctgtgtgtgtttacacaggtgggttttgttgtacttgccctaacagcatatgggaatgcagcacacaccccaacccacaccaactgccactgaagatgaagccatggtgggcacagaaccaaaaaccccacccctgctagcatctcacccttgaggtaatgctgtgcagaggaaaagggaccttcttataccctgagtgaccactgttgcttgggggggatcaaagaaggcaccttcactggccagccacccaccccaaaccagcactacctccagtgcaacagcacacacagcaggggccccctggcccacaccccagctgttttgcctccaccactgggtgaatgcccacagggaggcagggacttttgcatctggtagcattctgccacagctgccgcactttggtcccctcagtgcagtggactccaaacctcgaggagccagagaacaaagttgtggcccaatacaagttccccagagttaaagcacacagtccaagaattgggagctgcatgttggccccttaaaatcctccaaaaacaaaacctgttggctgaatccaccttacaccacaatcaaatcctcaaggtcatcagatataataaaggaaaaataccctgtccaaacgtcagcaacctcaaagattgaagatggataagcccataaagatgagaaaaagactctgtgcaagaacactaaaaactcaaaaattcagcatgccttcttttctccaaatgactgcatcaactctccagcaagtgttcagaactgggctgaggctgagatgtctgaaatgatacaagcagagttcaggatatgggtaggaacaaagttcattgcgtgaaagaagtatgttgtaatccaatacaaggaagctaaaaatcattgtaaaacattgcaggaagtaacagacaaaagagcaagtataaagaagaaaataactgacctgacagagctgtaaatcacactagaagaattttcataatgcagtcacatggtgattgtgtgtgattgcattatgaatattattgtatgtgtgggcacctgagagtgccctgtaagcaggtgtggccaggctggggtcctgggagaggcaagcagactagggagggctgaggtcagaccagctccatctcatgtgcaagaccatccaacagaatagaccaagaagaggaaagaatcccagagcttgaaaactggctttctgaaataaaacaggcaaacaagaatgggggaaaaaagaatgaaagggaatgaacaaaacatctgagatatatgggattatataaacgaccaaatctatgactgattaatgtacctgaaagagatgagaatggaaccaacttggaaaacacatttcagaatatcattcatgagaatgtccccaacctagccagacaggccaacattcaacttcaggaaatccagagaacctcagtaagatatgccatgagaagatcatccccaagacacataatcgtcagattttctgaggtcaaaataaaagaaaaaatgttaaaggcagctagggagaaaggcaacatcacctgcaaagggaattccatcagatttagcagacctctcaactgaaactgtacaagccagaaaagacattcaacatctcaaagaaaagaaatttcaacccagaatttcatgtccagcaaaattaagcatcataagtgaaggagaaacaagatccttttcagacaagcaaatgctgagggaattcgttatcaccagacctaccttacaagagctcctgaaggaagcactaaatatggaaagaaaagaccaccaccagccactacagaaacacactgaagtacacagacaagtgatgctaaaaaccaactacataagtctgcaaaaaagccagctgacagcatgacgacaggatcaaatccacacataccattactaaccttaaatggaaatgggctaaatgctccaattgaaagacacagggggcaagctggataaagaaccaagacccattggagtatgccgtcttcaagaaacccatctcacatgcagtgccatacataggctcaaaataaaggaatggagaaaaatatttcaaggaaatggaaaacagaaaaaagcaggtgttgcactcctagtttctgacaaaacagactataccaatacagattaaaaaaaaaaagagggctgggcgcggtggtttacgcctgtaatcccagcactttcggaggctgagacggatggatcacaaggtcaggagatcgagaccatcctggctaacacggtgaaaccctgtctctacgaaaaatacaaaaaattagctgggcatggtggcgggtgcctgtagtcccagctacttgggaggctgaggcaggagaatggtgtgaacctgggaggtggagcttgcagtgagccaagatcgtgccactgcactgcagcccaggagagacagtgagactccgtctcaaaaaaaaaaaaaaaaaaaaaaaaaaaaacagaaggagattacaaaggtggtcctgacctttgataaatctcattattgcttgataccaacctgggctatctttattgcccaaaccaataggataatgtgctgaggttagggagcttctcccccgcagataatccctgatctcccaaaatttggttgacatctaaggttgattgccatacaactccttttctgaagttttacttatttccaacaaggcaagttttcctgcttccatgatgatggagagcaggcacctcctttcttgagtttcagcttgcttctgacagggaaggtgagtgtaagttttttccagcttctaagatggcagagaacaatcaccagcctgagacttatttccaggtaagtagctgaattagagttttgtcttaaaatttttccttaatgactaaaatttaagattactcaccagctgcttttaatttctccttaccattagaacactcagtaatcatatgaattgtgcatttgtttgttttgcttaactctttttgtttgtttatgtttggggttttgttgatgttgtttcacttttctcccatctcttcctgacttggtcagatccaaagaatgctccaaattgtggggaacaaggcttctgaattggctaaaactcatgtggctgcaaaaaaaaaaaaaaaaaaaaaaaaaaaaatccgttagcagaaatgattttttttaacttttttatttttattttttacataagtggttgcatcttttgctagccaaggccaaactgaaggagtagtggtggcgacccaaagttaagattctgccctgttcactacagaaacctgagtttggttcctaagtctagttctttctgtttgatatttgtgttatttttaaaatatcagcagtttgtcccagctatgatgtggtagtaaaagattcagaagtattttctttacaagttctatgatgaaaagcttaattaaaagcaaatttatttttttaaaattatactttaagttctggggtacatgtgcagaacatgcaggtttgttacatacgtatacacatgctatggtggcttgctgcatgcaccaacccgtgatctaatgccatcccttttctagccccccaccctgacaggcccttgtgtgtgatgtttcccttcctgtgtccatgtgttctcattgttcagctcccacttatgagtgagatcatgtggtgtttggttttctgtttttgtgttagtttgctgagaatgacagtttccagcttcatccatgtccctgcaaaggatatgaactcatccttttttatgactgcatagtattccatggtgtatatatgccacattttctttatccagtctatcattggtgggtatttgggttggttccaagtctttgctgttgtgaacactgccgcaataagcatacatgtgcatgtgtctttatattggaatgatttatatttttttgagtatatacactgtaatgggattgctgggtcaaatggtatttctagttgtagatccttgaggaatcatcacattgtcttccacgatggttgaactgatttatactcccaccaacagtgtaaaagcattcctatttctccacatcctctccagcatctgttgtttcctgattttttaatgatggccattccaagtggcgtaacattgtatctcattatggttttgaattccatttctctaatgaccagtgctttgcttcacatgttcgttggctgcataaatgtctcctttgggaagtgtctgttcgtatcctttgcccactttttgatggggttgtttgtttttttcttgtaaatttgtttaagtttttatagattctgcgtattagccctttgtcagatggatagattgcaacaattttctcccattctgagggttgcctgttcactctgatgatagtttcttttgctctgcagacattctttagtttaattagatcccatttgtcaattttggcttttgttgccatctcttttggtgttctagtgatgaagtcttcgcccatgcctatgtcctgaatggtattgcgtaacacaaggacatttctgtgcctgaatgccatatctcccaaagtaatttatagaatcagtgctatctccatcaagctaccattgactttcttcccacaattagaaacactactttaaatttcatatggagccaaaaaagagctcgcatagccaagacaatcctaagcaaaaagaacaagctggaggcatcacagtacctgacttcaaactattctataaggctacagtaaccaaaacagcatggtactggtaccaaaccagatatatggacaaatggaacagaacagaggcctcagaaatgacaccacacatctaaaaccatctgatctttgacaaacctgacaaaaacaagcaatggggaaaggattccttattcaataaatggtgttaggaaaactggctagccatatgcagaaaactgaaactgggccacttccttacactttatacaaaaattaacttaagatggattgaagagttaaacttaagacctaaaaccataaaaaacctagaagaaaacctaggccaccaaactcaggagaaatgtacttgtagtgaaatgcatggtacaaacacacattccctgcttccttaagtggatgaggttggaggctggtccacctgctccaggtggatccttgcagagatggccggttgctctttgagccagcttggccttgcctggcatgcacaagcctcagtgcaacaactgtgttacaaatggagccacacagaaaatgaccagcaggctcagtagcagggtgtacattgcctttggggctccagtccatgcctcagggctcatatggcactttgggcttcttggttgccaagaggcagatcacaggccatcttgtggaggactttatgttcaagtgcagaaagcagccaggattacaacctaggggactcaggcttctgtgaccctggccagacttagaatttggtcccaggcatgacacgctcactcagagcagcgtgtcagtacctggggcctgtgcatgccaggcaaagccaagctggctaaaagagcaaccagacacctctgcaagggtgtgcctagagcagttggaccagccaccaatctcaccccctcaacgaagccaggatggccaggttcccacagcctgagtggctgccacctgatggctgatggagcagaggcctgaggaaaagcagatggcactggggccctacctttagggtagaagaactgaggtaccatgtccggcagcgagtgatgtttgtggctggtccacctgctcctggcacacccttgcagaggtggctggtttctctttgagccagcttggccttgcccagcatgcacaagtctcagtgcaacaactgttctacaaatggaaccacacagaggacattagaggcaggctcaggagcagggtgtacactgcctttggtgctccagtccatggctcagggctcgtatggcactgcggacttcttggttgccaagaggcagaccacaggctgtcttgaggaggactttatgttcgagtacagaaagcagcaggattaccacccaggggacttggcgttctgtggccctgaccagacttagaatttgggccaaggcaggacaaactcactcacagcagcatgtcagtagctggagactatgcatgccaggcaaggccaagctgactcaaataggaaccagtcacctctgcaagggtgcacctgggacatgtggagcagccaccaacctcagctactcaaggaagtagggatggccaagttcccacagcctgagtggctgcctcctgatggctgatggagcaaaggcctgaggaaaagcagatggcactggggccctacctctagggtagaagaactgatgtgctctgacctgcaacaagtgagtttggtggctgctccaccggctcctggcacacgcttgcagaggtggctggttgctctttgagccagcttggccttgcctggcatacacaagcctcattgcaacatctgtgctaggtatggagtcacagagaggaaatgagcagcaggctcaggagcagggtgtgcgctgcctttggggctccagtccatgcctcagggctcgtgtggcactgtgggcttcttcgttgccaagatgcagaccacaggccatcttgaggaggactttatgttcaaatgcagaaaacagccagtatcaccacccaggggctctgccttctgtggccctggccagatttagaatttggccccaggcagggcaacctcactcggagcagtgtgtcagtagctggggcctgtgcatgccaggcaaggccaaggtggctcgaagagcaaccagccacctctgcaagggtgcacctggagcaggtggagcagccaccaacctcacccactcaaggaagtagggatggccaggttcccacagcctgcatgtctgcctcctgatggctgatggagcagaggcctgaggaaaagcagatggcactggggctctacctctagggtagaagaactgatgtaccctgactggctgcgagtgaggttggtggctggtccacctgctcctggcacacccttgcagaggtggctggttgctctttgagccagcttggccttacccagcatgcacaagcctcagtacatcaactgtgctacaaatggagccacacagagaaaacagagcagcaggctcaggagcagggtgtgtgctgcgtttggggctccagtcaatgccttggggctagtatggctctgtgggcttcttggttgcaaagaggcagaccacacgccatcttgaggaggactttatgttcaagtgcagaaagcagccaggattaccacccaggggactctgccttctgtggccctgactggacttagaatttggcctaatacaggacaagctcactcagagcagcatctcagtagctggagcctgtgcatgccagtcaaggccaagctgtctcaaagagcaaccagccacctccgcaagggtgtgcctggagaagatgtagcagccatcaaactgacccacacaaggaagcacggatggccaggttccaacagtctgactggctgccacctggagactgatggagcagaggcctgaggaaaagcagatggcactggggcccaacctctatgggagaagaactgatgtgccccaaccggcagcgagtgagtttagtgtctgctccaccggctcctggcacacccttgcggaggtggctgggtactctttgagccagcttggcttcgctcggtatgcacaagcctcagtgcaacaactgtgctacaaatggagccacagagaggaaatgagcagcaggatcaggagcatggtgtgcactgcctttgaggctccagtccatgtctcagggctcatatggcactgcgggcttcttcattgccaaggggcagaccacaggtcgtcttgaagaggactttgtgttcaaatgcagaaagcagccagcattaccacccaggggactctgccttctgtggacctgaccagacttagaatttgggccaaggcaggacaagctcactcagaggagcgtgtcagtagctggggcctctgcatgccaggcaaggccaagccggctcaaagagcaaccagccacctttgcaggggtgcaccgggagcaggtggagcagccaccaacctcggctactcaaggaagcaaggataggcaggttcccacagcctgtgtggctgcctcctgatggctgatggagcagaggcctcaggaagagcagatggcactggggccctacctctagggtagaagaactgatgtgccgtgtctggcaggcagcgagtgaggttggtggctggtctacctgctcctgtcacacccttgcagaagtggctggttgctctttgagccagcttgtccttgcccagcatgcacaagcctcagtacaacagctgtgcaaatggagccacacacagggaattagcagcaggctcaggagcagggtgttcactgcctttggggctctagtccatgcctctgagcttatatggcactgcaggcttcttggttgccaagaggcagaccacaggccgtcttgaggaggactttatgttcaagtgcagaaaaaagtcaggattaccacccaggggactcgcctttctgtggccctggccagacttagaatttggccccaggcaggacaagcttactcagagcagcgtgtcagtagctggggcctgtgcatgccaggcaaggccaagctggctcaaagagcaagcagccacctctgcaagcatgctcctcatgcagttggaccagcctttaacttcacccactcagagaagcatggatggccaggttccaacagcctgaatggctgccacctgatggctgatggagcagagtcctgaggaaaagcagatggcactgctttgtaatgcccttctttgtctcttttgatcttttccatttaaagtttgttttatcagagactaggattgcaaccccctttttttttttccttttcattttcttggtaaatattcctccatccctttattttgagcctgtgtgtgtctttgcatgtgagatgggtctcctgaatacagtacaccaatgggtcttgagtctttttccaacttgccagtctgtgtctttttactggggcatttagcccagttacgtttaaggttaatattgttacatgtgaaatttatcctgtcatgatgttgttaggtgtttatttttcccattagttaatgcagtttctttatagtgtcgatggtcattacaatttggtatgtttttgcagtggctcatactgtttgtccctttccatgtttagtgcttccttcaggagctcttgtaagaatgtggatttatttcttgtaaggcaaatatgtggatttatatctgggtgctgtattctatggcctctaccccaagagtcattacttttaaaaatgcaattcaaattagcataaaacatttacagcctagggaaaggcttatggcattagaatccttatttataggattattttgtgtttttttgagatatggtctctgtctgtcatccaggcagaagtggagtggcttggtcataattcactgcagccctgaactctgagtccaagccatccttgtgccttagtctcccaactagctggatctacaagcataagtcaccatggctggctaatttaaaaaaaaaattttttttgtcgagattatgttatcactatgttgctctggctggtttcaaattcctggcctcaagtaatctttctgccacagcctcctatagtgctgggattacaggcatgagccaccatgcctagcatagagtattacattattttcaaagtcttattctaagagccatttattgactttggcctaaataactcaatattatatctctgaaactttttttgacaaattttggggcatgatgatgagagaaaggggtttgaaactttctaataagagttaacgtagagccatttaaggaggaacagacacaaattatcagaaaaataaaagaaagatcaagtgcaaaagttctgtggcaaagatgatgatagtaaagaatatatgtgacttatggtggcttttactttgttcttgaatttctgagtaatttaagggttaacatttaaagaatctacattatagataacattttattgcaagtaaatgtatttcaaaatttgttattggttttgtatgagattattctcagcctacttcattttcaagctatattattttattaatgtagtttgatgatcttacagcagagctggaagctgtatcttcaaaatatgtctgtttgactcaaaacaatcaaggtattcaacaggagttattatgtatgaaaaaatacaacaggaatgtaaaaaacttgaggctaaaaagatgttggaagaagtaatattaaatcttaaaaaacgtatggaaagtacacattggtgaagacacattggtgaagtacaaaaatataaattggatctagaagaaaaggcaatgcaggcaatggaaaaattagtacaaatccctttacaggttagtttgtaaaatcaggtaagtttatttataatgtgctttcatttatttcactgcaaattatattttggagattatatatatatatatatcgtgtttcctctgcctctcttatagtaatttgccttgtggagttctagcaaagaggtggcttctgtttttacttttatatgtttaaatttccatcattataacaaaatcgatttttcacagtaatgattctcagtgtggagtcatttgattattaagacccattgacatgagattacatcctctgcctataaaaatcctggaagaaaacctaggaaatattcatctggacattgcacttggcaatgaatttatgggtaagtcctcaaaagcaattgccagaaaaatgaaaattgacaaatatgatttaattaaactaaagagctgcttctacacagcatgagaaactctcaagggattgagcagacagcctacagaatggaagaaaatattcacacactatgcatacagcaaaggcctattatccagaagccataagagacttatgcaaatcaacgagcaaaaaataaataaccccattaaaaaatgggcaaagaacataaacagacagttttcagaagaacacatatgtggccaacaaacatattaacacatgcataccatcactaatcatcagagaaatgcaaaacaaaacagcagtgaaataccatctcacaccagttagaatgacttctgttaaaaaggaaaaataataaaaatatttaaatatttaatattaaaatatcatttagattgagataaattaatttgtcattattaattctcaaaacatggatatttaagaataaccttacttcacatgtaataacaactaccttaaaaactaaaagctggggcctggtatggtgtctcaagtctgtaatcccagcactttgggaagctgaggtgggccgatcatgaggccaggagtttgagacaagcctggccaacatggtgaaaccccgtctctactaaaaatacaaaaattagctgggcatggtggtgggcacctgtaatcccagctactcaggaggctgaggcaggagaattcattggaaccctgggaggcggaggtggttgcagtgagctgagatcacaccattgcactgcagcctgggcaacagggcgagactccatctcaaaaaaataaaataaataaaattaaatgaataaaaacaaataaataaaagctggaagttctatgaaaacaatgcacataccatttttaaaaaatgttcatggtttctctagagatttcaatacctattctagcttattacagtaacctataatttgtactataccaactatggtataaaaaccttaaaatgtatatttctgtttcctctctcctttatactatttatgtcatgcattatagtctcaaatattatgaattccataatataaagttacttttttaaaaaaaaattagacaatcaattatctttagagcaatgtaaaataattgggttatatatctttatatcttctctggcattatttatttctttgtgtagtttcaactttcacctgcttccatattccttttgcctcaagaaatgattttgacatttattttagtgcatacctgttagcaagggactcttccagtgttaatctgcaaatgtcatttaattgttatttttgctgtattacagttaatggatataagattgggggttgacttttcttcagttatttaagaattttgtatcattggtttctgacttgtagagttactgacaagcagttcattataatgtttgtttctgtttatctctctacacagtgttcctattttttctgtgactgaattcaagatttatggtaatcattggttttcagcagtttgactagtgtgattattctagcgttctttaaattttgtattaatctttcttggatattttgaggttatttggtctccttagtcatctttttcaaatttttcttctctcacattctgtttttactttccttctgtaattccaattaattatattttagttaatttcatattaccagaaaattcttggattcactggagtattttatttgcttggtttattggtttatttggtttttctctttcctccctttgtgctaccattcaaatgatttgtattgacctagtataaaatttactgcttctttctttaactctgatgaccagtctgctaatcagcttgctgatgtaattcatctttgttctcatgctttcacttatttctagattttgccttttactgttcccatctttgctgaaattcctcatttttccatacatgttgtattttttagctagatcctttaacattttgatcattattattttaaattacttgcatttagttccaacatctgaattatctctgaatttgattctgttgactttttatcctttgaaaatattataactcataactcaaatttctaacttgcttttatgtgtctcccaatttctaaaaaatgcaaatcatctgatgtagaaaaacagtagatcatgagataattatgtcgagattgttttatatttctgtttcatttttatgtcatgctattagtgtgggcaggaacaaaggttgctttttgctgcggtgtctgaaacattcagtgaccaatgtaactcagatttctccagcagtaggctgctatgtgatgtgccttgtgtggggccttagactctggagagcatatgccaatgatcctgttccacagttagctttcggtagtccttaccacctatgttatagagagggtctctctccactttcttgttcctctctaactgtagaacatcattttgtgtatatgtgtgtgtgtgtgtgtgtgtgactaggcaaaaaattcaggttggggacagagggatgattcatgttatttttgagccagtttcatcattggacactcacagaaggggtatttttaacacttcttgactcttattctagtgggagtcaaactgtcacttacctgtgttgttttttgcagaagaaataataccttaccctcctcccacctcagtagtagaaaacctctgatttatatcattgcaagttttcaaccccacaataaggacaaactcttttatttctccttccataggaacaatatacctttgtctgtggtcactggatggagactttccaaacctttaccacagtagcacgactctgcattagtgcaaaatcctgggccccaaaacaatccttgttcctctcctgatggaggagtatttttcttgcatccctctcccagaagcagtgatcctttgcctggtatcaggtggggtagggtagggtatgagaggtttcttaaccttctctgaaagctgatgtgttttgcttcttcttatctcccagaaacagtagacttttgcatgggttcatggacccagatgcttttttgccacagcaaattaagggttttgattcttaggagagaagcaaatgttcatgtagtcaatttttttcttatttattttttgctttgttttcttatttcagtaatgatgagttcaatatgatcattattttccacttacactgcttgcaactctaatgttttgtttttgttagtccccctttgacagttcagcactaaatcaaatgcagataatcatcagttgtgtgaataaagtgtttttaattgagaacaaaattgttgatatagacacaaatttggatattatcctacttagcacaatatgtcgctggttcaaaatgtaaaaacctctttaggctgaagaaagaatggttcttggaactattgtccctttttgacaaataaaataaaacccaatgctttttatctcatggatagattattaaaataactacatacctgatcttcattttatgttctctctcttcaagatattccttcaaaactactttgactgattagtctcttttgaattatgttagactctgtattttctccacaagctcatcagggtaaatcctgcctttacattttttataaaaattctctttttttttcaaatcttagttgagctgaaagatttccaccaaatgtctcctatgccagaaagccttattttacttatctcccctgtcctccttgctcaagctcatttaggaatattttaattaaaacattcatgcaatactgttttttaaaaaatctgaacatatagtattttcaatctgaatacaaaatagtgctctaatttgaaaacaagttttagaagcaaatgtttctagaaggagaatcaacagtgtcataaatatcataatccaattttcctgtttgtactaaaacattagcaaatatttattgagaaattgccatctgcctgaaagtataatgcttttgatgcacattatatcataaaaactaggtactattattagtagtatcttaagagtaaaaatattgagtcttagagaagttaagcaatgtgcccaaatagcatagggaaagttggaattctgaaattctgactatgctgtgcgtaggttaggagaatcaaggcttgtcaaatgtaactgttaagtcattgtggggatacggaggcctctgattgctagggtcaatacacttaagcagatcatgtcactacttagttaaatctatttcattaaagcaaaattccgtaaagattattggcaccaaaactattaattttccttccttcctttctctctttctttccttccttccttccttccttccttccttccttccttccttccttccttccttccatccttccttccttccttccttccttgtctttctgtctttctttgagacagggtctcattctgttgcccaagctggagtgcagtggcacaatcatggctcactgcagccccagcttccccagactccggtgatcctcccacctcatcctcctgaatagctgggactacaggcaggcaagccactatgcctggctaaattttctttttctttttcttttttttttttttttttttgtaaagattgggtttcaccatgttgccgagcctggtctgcaactactcagctcaagcaatccacctgcctttgcctcccaaagtattgggactccaggtgtaagccacatgcctggccaaaaatattatttaacaagttcaatttaactattagattttggacaatgagggatagaattttctacatcataaatcatcttgtgttctttatttaaagtaatatgtaaggatttcaatttgattcaaatatatttattagcaaattaaatgtctttttcaggattccaaacttttgttgaagacataaatgttaaatgatgtcactaattttaattagattagcagaaaggtactctggtgtttaataacaatgacagaatgggctattaattttattttctttccctttctccctttcccctttttaaaatattttactttttaggctctttggaatcctgtagatagagttttggagaattagacaaaacactcacagaaactgccaacccttggatgaaatatattgttactgtgctttgggattaaaataactacagtttatagaacttttgtactgatacacagacactaaaaagggaaagggtttggatgagaagctctgctatgcaaccaggaatctcagccactcatttctgtcggagctgcaggagctccctgtaaagagaggttatggagtctgtagcttcaggaaagatacttaaaacccttcagagtttctccatttttcccagagtttccccaaaaaggttatgacattttataagaatgcttcacttgtgataaactaatatcaaagtcttcttgtaatttatatttaaggataaatctttatcccatgtttaatttatttagcttaccctgtagctaatatttcatgctgaacacattttaaatgctgtaaatatagataatataatttatggatcattaatgcctctctagtagtttagagaaaatgtcaaaagaaatggccccagaataagcttcttgatttgtaaaattctatgtcattgactcaagtttatatggcatctcaaaatataaatatagacatctcagaaaatatatttgaaatagcaaattcctgttagaaaagaatagtacttaactagataagaataacaagtcaccattatttgaattgtctcctattaatttttgttgtgttgtgttactcatgttttacttatgggggatatacataacttctgctgttttcagaattattgtatgcagtcagtatgagaatgcaatttaagtttccttgatgctttctcacacctctattactagaaataagaatacagtaatattggcaaagaaaattgaccagttcaataaaattttttagtaaatctgattgaaaataaacattgcttatggctttcttacatcaatattgttatgtcttagactaccttatgtgaaattaaggctttgaaattctaattatgtgcaaatgtgtaaaatagcatcacctaacgctatataatatactctatttctatactgtgatggcaggtttataattctggaaagatatacacaacatgaaatttacctttttaatcactttaagtgcacagttttgtggcattaagtatatttgcactattgtgcaacagtcaccaccatagacctccaaaacttgtcttcttctccaactaaaatgctttactcattgaacaccaacttcccattcctctccctctccttccccctagcaatcaccattctactttctgtctctacaactttcactaagtaactcatagaagtggcatgatagaatgtttgaatttttctgactggcttatttcacttagcatgtcttcaagtttcatctattttgtagcatgtgtgagaatatattttaaggctgaatattattatgttgccgtatataccacattttgtttaaccactcatccatcaatattcacaagggctgctccctccctttgattattgtgaataatattgctaatggacacgctgcacaaacatctgtttggtccctctgctcatttattttggatatggatttgcattttaatacaaaggagaaattacacagctttttaaaagtgtccagataaaaaggagcacaacatcagtaaaatattagaaagtagattagggggaaaaacagggaaggaattgaaccaaaagtcaataagctgcataagagagtttcaagaggaggaaaaaattgacaatattaacatagaattaaagagcgataggtagatatttagaaaattgtctcatgtacttatatgtcgcctgtgaactgatatttacattattttattattccaggtttccaaaagtaagtgcaatatgagagtttcatgatgctaaataaactgaaacatgctatatattttgatatattgtccttgagaggaggctgagtggtaattagtgcaattttaaattatgatatgataatgcagtcaatctgccaaactgacaaacagtatatatacaatatgtatacatttctcgcaaaattcagttttatcatacaattaaattatgatttaaaactacctgacaattaatggaggaaaaaaataaaacaacatttgcattaatattaccataattttgatattattgtaaatatcaaaatatgtacttagagataaaccagcaaaaaagagaaacatttgaaaactacaaaactacaaaatattgctaaaataaatgagacctaaataaatggaatttatgagtcataaatctctatattgttaagatgtctactcttcccacattgatctataacaattccaatcaaatcacagctggatttcttattttagaaattgagaaactaaaattctgaaatgtacatcaatgggtagaggacctataatggcaaattactttgaaaggaaacagttactttgaaaccaggtgctgctggagaataaacagcacctggattcaagacttagaacgttacagtaatacttaagacaatgtagtacaaatatagatatacacatgtatatcagctatcagctaatttttgataaagttcttagaccattcatggacataacattttcaacaaatgcttctgaaacaattagatatcccagtatatatttgtgtgtatgtgtgaagctcaatacttcacacctgagaggtatgagtgtgcattacaaaagagaactaggaagctttgagagtattggatatgctcattgtccccttcatggtgattgtttaatgggcacatgtacatatcaaattcatctcatttacactttaaatattggaagtgtgttttatgttcgttagacatgaataaagctgcaaaatgttaccaaatattcacttactatgcttttattcattttcctctctctataaaccttcagatagaaaatgcagttgaaagatatttcataaaggaagaaaagaagtatgaatacaggtgagagatattactgagattttttttcagtgcaatcctgggcttttctgactagcaatatttttatgtgcagaagtagtagaaaagataaatattttgtacagtagaaaaacacattatttctgtgccatggaagagagaactcacaaagatgacagcttctggctatgttggatactaaccagtactgtaagtacccaacgatctgactttaacactggctgtaaagctcctttaatgttccttgcaaggatttgaacctatttactggaaccctcatcgcttattgagttgaaaaacattgttgatatgtgtttatcttatatttgcagtagagtcataattttactttttagaaaattatatattaaacaaaaaaagacacatgaaattgtatattgtttaatgtttcaactgtgatatcactccatatgcatatttaaattcctatttgataaaggataggaaatacagaaagaattcttgtgataatagcgaacacagaactgttgaaaggtgttgaagctgagctggagagagtcaccaaggctggcgccaaagctggcaaggtcggagggtttcctgcctgggcggcacagcttgagctcgccctgcgtcacgagtggtggaaactgcagacccagctgggccctgaggtctctgcctcagcctcccgcctgctaggagctgcgctgaggtcccagataggcgacgctggcggggtgcccctgagcgaaggcagcccatgtgtgggacagcagcaggagaccagggtccagggacccacctcccaccgcgggaacctcgagcctcccctggcacccctagcttggtccgcctggcctccggagcccggtgtgtatcctggtcatggggacgcccaccaggtgcccgggagtccccctcggccacagcctgcggctccgccggccctcaagcccggtgtggggactccagccctgccgcctctgctcccgccaggccgggacctgtcctcctcctgggcgcccggcagtaggggcgatgcacactgcccgctgccctgcacagcctttcgccgcacatcccctctcgcccctctgccccgggccaggaccttcctggccgcacagaacccaccttccttcccgttgtagagctgctccgcttccccaacccacagggaaaaacggcagatctccaaccaaacagaaatctgtgtgtgactcctctggtttgatactgccagtccccacattttcttccgggtgttttcttggcagaatgtgctcaatgtttgatgtttcaccagcaatgaggctgaaaagtgacagcaatagagaaacacatcaggctttccgtgacaaacatgaccttcccttcttcaaaactcagcaatctccacggcacacaaaggacttaggacaagatgaccgagctggagtgctcgccccaaaatgcaggcccggagtgggtcacctccttagggcaggcccaggcttgtcctggctgccccggcgcctttctcctcccacccaatgcaggggaccccacaaactcggctgttggggctccctgctcctccctccacagaagccacctcctgccctccaagctgggggtctcctggggcgtcctgggctgagagggaaagacgccagctccgcaagccaggaagggaacaccgccacattgttacacgcacacaccaccacactgtcacatgtacagacacacggagacattaccacacggacacaccgtcacatggacacactggcacattcacatggacggacacacagacatacggagaaatccacacggacacaccaccacactatcacagggacacacagacacacggagacatcacatggacacaccaccacactatcacagggacacacagacacacaagagacatcactacactgtcacatggacacaccatcacaggaacacacaaacacactgccacatggacactgccacacacagacacaccgccacactgtcacatggacacacctccacactgtcagacaccaccacacagacactgccatgtggacacaaggacacacagacattgtcacatggatacacacactgtcacacggagacatcaccatgcagatacatgaacacaccaccacatggacatagcaccacacagacactctgccacacggacacaccaccacacagacacaccaccacgctgccacacagagacaccaccacatcgttgccacattttcatgtgtcagctggcggtgtgggccccacgactctgagctctaatagataaattacttaggcatatagtgaaggcaaaattttttttttctgaggcgtagtctcgctctgtcccccaggctggagtgcagtggcgcgatctcggctcactgcaagctccgcctcccgggttcacgccactctcccgcctcagcctcccgagtagctgggactacaggagcccgccaccaagcccggccaccttttgggtgtttttagtacagacggggtttcaccttgctagccaggatggtctcgatctcctgacctcgtgatctgcccgccttggcctcccaaagtgctgggactacaggtgtgagccaccgcgcctggccaagaatttctttccatctcctgtgttattgctttggcagtggaaatgcgcgtggcctctagagtgggtcccaaggtcatgaaggcctgtaaggtggagggcaaggtctctctttccaggctggaatggaggaagatgtggtggccgaggggctgcatgtcctcctcgcggcaggcccctgaggacctttatcctcctgagccgcaaatgtccctcaggggtgtctaaagcgctgggtggggcccttataggccttacgagctctggccaattagtggtccgtaaaacgcagaggtgaacaccatagaaccacaggtccaggagaattttgcaaaagctctgaggatgcccttttttattctcccactgcaaaattgttttaaaaagcaaaaaatccagcaatgtccggggaaagtcaatactgagtgtcagcgcgggatgctgccgctgatacggtcccggcgtcctggccgaaagtggcctcctcggggaccgcatctccgcgcaccatggcagcaaacgccagcggtttgtgggcggatggtgtccccgtggccatccccgctcctgagtgcggaaggacagacaggagcggggacttctgggtgttcctggtgtcagccagcttgacgccgttgttcctcctggaaatccgggatttggagaagcacctggttcctgatggaggccgtgggcctcttggtccccgcttaccaggcagcggcgccagcctagttctcagccccgtccctgatgggcgccgccttccatcaggccaaagactttcctccaaactacccttcttggggcagggaagcagcatcctgggccttccctggggcctgtggtgctggcagcagctccacgttgaggtcgcctgcagcccgcaccgcggagcgctggaggttcctgagcccggtctggggaggccaatccgcaggtgcctggtgcccggtgcctgccgcagtctcaaaagcgcctggaggtgacatccaggagcaccactgcaccacccgcagggagacccacggcgaggcgcgccccctaaagcggccaaggaagaagcagaaggataggaaggcacccagagcttggggtgatctcaggccgcccgccccgaccaagttcctggtctccgggaggtttttttttaatttcttccatattattatctttattattattaacttttcaagatggattaaagacttaaatgttagatctaaaaccgtaaaaaccctagaagaaaacctaggcaataccattcaggacataggcatgggcaaggacttcatgtctaaatcaccaaaagcaatggcaacaaaagccaaaattgacaaatgggatctaactaaactaaagagcttctgcacagcaaaagaaactaccatcagagtgaacaggcaacttacagaatgggagaaaaattttgcaatctacccatctgacaaagggctaatatccagaatctacaaagaacttaaacaaatatacaagaaaaaatcaaacaatcccatcaaaaagtgggggaaggatatgaacagacacttctcagaagaagacatttatgcagccaacagacacatgaaaaaatgttcatcatcactggccatcagagaaatgcaaatcaaaaccacaatccgggaggtattgccaaagacgatgtgggctttctgggcaatgtccggcctgagctggagattctgggacgcggtcaagtggtcctttggagattccacggcttcggatccctactgcaggatgctccgctgtgtctgacagcctctggcattttgctgaggggtaacctcggaatgtatagacataagaacactgggatggcccagtcgtgccccaggcattcccgcacacagtggtggcaaaggcaggcgctgagacaaagtgcccagtcggcttggtgagagttctttacaggttagtgacagacttggtcccgtgcttgtgttttctcatgttttcagttaacctgcggatgcccaggggctcctccatctccagcctgttctcctcgggctgaagcccaaagtcccccattttctcctcaaacagctcacagagccacttctgcaggcaggaggacagcggtgggctcagtggctgacctaggaagccacatctgaaggaactgctgggtgactatggccataagtcaatcaaagcagactccctggcttgctgcgctacattgattttgttttcattttttaaaagacgcagaagggaggtcctaggaaatttgcccaatgcagatgctgacaagagtggtgacatgaaaaagattacccagaaggaaaacaagagctattttctaaacatctgaaatctgtataggcttttggaaaagtgaaactagatgcaaagcacaatgatataattctggcaatttccactgacacagaactcagtcaatctgaattaatctaagggttataaggaaaatggcactccaagaagtatctattaacatcactcagctgctgtgaaataggcttacagacaacacggagtgtcaattatccaatgtttaaagtcagtgatacagattggactacaatctctatggctcataaagtcttctttaaaggattgacagatgatttatctcatatgtagacaatgattctcagcagttagctagcacaacttgctaatatcaattgcttgagaaaatcagataattgcttgagaaaattaggacattgcttgaggatgttaggtaattaaataaattacttttttaaagaatagtttaatgttttggcaagtagactttaaaatagattggtaatattttaaaggccacttttaaagaagtagcaatataacatgtggaattatgaaaaataataatgttggaaacaattcaattttctatcacagataatttcacaaatatagaaataccatctcaataattagaagaagtagcagcaatttctgtcatttttatgcaagttactcctagtccatttatctggtcttaaatagtgtttttaaaatttgttttcaaacaagtctaatcataaataatagaatatattttacaatagttgaaggtaacaaaaaataagtgctatttaaaaaattgtattagattgtttaaaaatgttgtgggtacatagtatgtgtatgtatctgtggggtccctgagatgttttgatacaggcatgtaatgtgaaataagcacatcttggggaatggggtatccctcccctcaagcatttatccttcaagttataaaaaatgcaattacagtcttagttatttcaaaatgtaccattaaattattattggatatagtcaccctattgtgctataaaatagtaggtcttattaactctctatttttatacccattaaccatccccaccttcccacaaacctccccccagctacctttcccagcctctgataaccatccttatactccatatgtccatgagtttgttttgattttagattccacaaataagtaagaacatgtaacatttgtctttctgcgcctggcttatttcacttaatataatgatccataatgttccatcattgttactgacaatgactggatcttgttctttgttacagctgaatagtcctccattgtgtatatgtaccacattttctttatccattcatctgttgatggacactaaggtttcttccaaatcttagttttgtaaacagtgctgcaacaaatatgggagtgcagatatgtatttgacatactgatttccttcatttttggtatagacccagcagtaggattgctagatcatatggtagctcaacttttagtttattgagaaacatccaaacagttcaccttggtggttttattaatttacattcccaggagcagtgtacaagtgttccattttctctgcatccctgctagcatttgttactgcctgtcttttgcatacaagtcatataaactgtggtgagatgatatctcattgtagttttgatttgcatttctctgatgatcggtgatattgagcaccttttcttatacctgtttgccatttgtaggtcttctttcgagaaatatctattcaaatcttttgcccccttttttttaaccaggttattagattgtttcttaaagagttgtttgagctttttatatattctgattattaatcctttgttggatgagtagtttgcaaatattttctcccattctgtggattgtctcttaactttgttgattgtatcattttctgtgcagaagcgttttaacttaatgtgatccatttgtccatttttgctttggttgcctgtgcttgtcgggtattgctcaagatatttttgcccagaccaatgtcctggagatttttttatagtttgaggtattagctttacatctttaatcaactttgattttacttttgtattcggtgatagatactagtctgttttcattcttctgcatatggatatccagttttttcaacaccatttcccaccagtgtatgttcttggcacctttgtcaaaaatgagttcactgtaggtatatagatttgttactgggttctctattgtgttccattgatctatgggtctctttttatgccagtaccctactcttttggttactataattctgtagtataatatgaagtcagataatataattcctccacttttatttatttatttatttttgcttaggatagtattatttcttatactgaaagcattctatgttatttattattaggctaattttgtagtttacaatgctatcctcttttacaaagctgtgatcaactcaaagtccagatcagggtcaattgtagctatttgcaaaagtagcaatattctggctgggtgtggtggctcatgcctataatcccagcactttgtgaggccaagacaggcaggtcacctgaggtcagaggttcaagaccagcctggccaacatggtgaaaccctgtctccaataaaaatgcaaaaattagccagggatgatggcagatgcctgtaatcccagctactcaggaggctgaggcaggaaaatcacttgaacccgtgaggtggaggttgcagtgagcccagaatgcaccattgcactccagcctgggtaaccaagtgtgactctgtctcaaaaaagaaaaaaagcactatactgtgtaattattgacagcataattcactattatgtggatcagagagcagaggattctgaatgcatgaacatatctttaacatttcaatacattactcataattactaatgaactaaagagaaaccaagaaattatggtggtagttatattgacctggagaaatgtagacacaaaagaatggtaagatgagaaatgtgttaacacaggctataagggcatgcaagaataaaaataggggagaaaacaggagagtttttcaagagctttctggtcatgtaagtcaatttgtatcagttaatttttaaaaggtttatttacatgcaataaactgcacatacttcaattgtacattttgataattcttggcatttgtagctctacaaaaccaacaacatattaaaatagcaaacatatccattacctttaccaccaaagtttccttgtgctttttctactcactttttcctgcctatccccattccatccacaggcaaccactgatccacttccagtcactatccatgagtttttatttccaaatacataaaatcatagggtatgtatactttctgatcactcagcatcactatttttgagatttattcatgttgctacatctatcaattgttctgttcttactagggagtattatttcattatatacagataccatagtaagtttataaatcacaaattcacctgtccatggatatttgaactgttttcaggttttggctgttgcaagtaaagctgctatgaagattcatgtaaaatcctttgaatggtcatatgctcttaggttttcatctctaccggaagtggaatagatagctatatggctatcatgtctgtaatatgcaaacacaaagcctgacaaaactgatttctaaagtggaaattccactgaagaaccttgactccaacctggcttttgagattatctcctatgtctggtgcaatgattggtcctggggtagccacatgacccaagggggaccatgtttaaacttctgagttttcactgagattaacatgcatttgttgaaagagaaaccccttttcccctactcccccagctgcaaatgctttcagggattacatcatgttggaacatttggttacagtgtttcctaaactttgagggtaaaaattgttcaagtaggtaaaaatggagcacatacaaagaaaaaaggagtccagaaatatcaaataaagaaagggcctccataaaatcatttgaacttatgattaattcattagtcattaaaataagtttagtgtacaaagaatcatccccccaaccaccctttattccttcaccaggtttaagttacattttttaacttgcaaacaaaagatttgtcattaacttagacatcaaaatcccttgtctccaagagcaatcattcaactctgtccctctcattattacaataatatgttcactttattctgcatacacctgctctttgcccttgtctccctattctattctgttaaacttatatccagacatttatttcattttatatcaaagaaactgtatacatgtttttaatcttagaaaaatttctgagtaatcttttgtctcatattcgattttaagccacccaagaagcattattttttcatttagcattttaacttttctaacccaggacttttatagtagatattatgtctttttctaaatgtcctgcttcaatttacattttaaatctaatttttaaaaagtgtatgttttgaatattagcatcatgcatctcaggcctaaatatcccttgataacaaatattgtctttttttctctacgtttttcacatatttcaatagggagatatattgcctgcaacaataaaagtttttgtcaatataacataacacataggcaaaatattgtttccaagtgattgatgatgtggtgccttcagtctagtcccaacccctcaatgtaatcatccctaaatctaatgaaatatgaaataaatatttcattttgtttctaaaattcagcagaaaaatatatagcctgtcacatatagcctgtaacaccaacatataaaaattaaagcagttccttctccactcccactgcttcacttgactagccttaaaaaataataataataaaaaataaaagcaaaattgttcctttacttatctttgaaatctaatgggtatactatcagaaaagctcttatatatatggagggcctctataaaatatagactcttaactagaaaagtagacttatatgatagttaaatttaaaacacaattgtatatggtaccttcccaaatgcaccagtacttatttcagaatgcatgatgtaattgactaaaccatttagggctagacctctgaaataaaaggcattcacactttgtgattcctggggaaaatattattcaaaatagaaacatgcagaacctttacctgatcgtgataaaaaaatgttcctacttgttaatatgccacagcttttacaaggtcagcaaaaagagattatcccataatataagctgatggccgaaattatctgccttactttagttactataatatctattaagtgtaaatttcttttgaaagaaaacagatacatttttctcagaaatgtctttagatgaagatctagcacatctgtgtttctcactttttaaaatgttgattttattgataaataaatatatatagggtacaatgtggtacgatacaagtaaatattgtgaaatggacaaattaggctaaaaaacatatccttcacctcagatatttattacattatggtgaaacatttaaaatgtactattttagcacttttaagatatgcactacattataagtgactgcagtcactttgctgtgcaccatatcaccagaatgtctttctcctaactgaagcattatcccattgaatatttcccctttttccacccctgccccccaccctgctcagcctctgataaaccaccattctactcttaacttctatgagtgcacagttttggatttcacatataagtgatattaagagatatttgtctttctgtgtctggcttattttacttagcataatgtcctctaaatccatccatgtttttgcaaatgacagaatttcattcatttataaagataagccgtatttttgtatgcatcctacatatacttttaactttccacagctttattgagatataatttatacattgtgtaattcactcatttaaagtacaaacttcaaattcttttagtatattaactggatggacaaataatcatcataatataattttagaacattttaattctccttaaaagagacttgcacccattagcaatcttccccattttctccagctttttttaaacccctcctagtctaggcaaccactcgtctactttctgactatgaatttgcctattctggacatttcacataaatggaatcataataacacatagtcactttttactcacatctttcacttaacgtatttttaatgttcatccattttggagcatgcattaacagttttttaccttttcttgctaaataaggttctgttttatggacacaccacattttatttatccactcctcggctgatgaacatttctgttgttttctactttgtgttgctataaacatttgtgtactactgtttgtgtaacatttgttttattttctttttggtaaacacacagaagtggaattgctgggtcatgtgataactctatgtttaaccatttgaagaactgccagactgttttacattttaaagtctcaccagtggtgtagaagggttccaatttttccacatatttttatccatttttcagttgataagcacttaggttgtttctaattcatgggtattatgaataatgctgcaacgaacatgaaattgcagatgtctctttttgacatacggattgaaattcctttggacatatatccagaagtgggattgatggatcatagggtaaatatacttataatttcttgaggaaacttcatactgttttccaagatggctgtactaatttccattcctaccaacagtgtacagggtttctttttctccacatcctcatcaacacttatcttccgtctctttttataatagccttagtaaaatgtgtgaggtgatatctcattgtggctttgatttgcatttctctgataattagaaatgtttttgattttttcatgtacctgttggccttttgtatgccttaggaagtgtctattctggttctttgcttatttttttaataagcatagttttattcttatttttgagtaggttgagttacttatatattattatatgagccctttatctgatgtatggtttaaaaatgttatcccatttgtgggttctcttcattctattatcgcttcttttcctgtggaaaagctttttagttttatgcaatctcattcgtgtgtttttgcttttgttgcctgtgcttttggaataatctacagaaaatcatagctcaggccaatgtcatacagtcttcttctatatttccttgtagtagttttacatttaagtctttaattttgatttgatacttgtataaagagcaaaaggaaagtcaaattttattcttctgtatgtggatattcagttttttctacaccatttattgaaaataattttctttcttcattgtgtatttttagtcattttatcaaaaaatcaattgaccacagacacacggacttatttacgggttctatatccctttgcactgttctacctgtctgtttttatgccactgctatgttgttttaattactatggctttgtaatatagtttggaattgggtagtctgatacctccagctttgttctttttgttcaagattgctttggttagtcggggtcttttgtggttccatacaaattttagcagtaatttttctatttcggggaatttgatagtggttgcatttaatctgtagattgctttgggtagcattgacacttttacaatactaatttttgaatccatcaataaaggatgtttctccatttatttatgccattttaatttttttcatcaatgtgctatagttttcagtgtgcaaatctttcacattcttgattaaatttactcctaagtcttttatatatttttatatctgttttgattctattataaattgaattgccttattactttatttttcaggtaatagtttgtcattagtgtatagaaacaataatgctagctgtatgttgattttgtaactattaactttattgaatttctttatcagctttaaccatttattttggtggagtctttaagattttctctatcttgagtgcgcgaggcgcggggagcctaggacctggagcgagagccgcctacctgcagccgccgcccacggcacggcagccatcatggcgttcctgctgcgcttcgtgctcctgtgcggagtcgcggatttcaccagaagtttgagtatcactactcctgagcagatgattgaaaaagccaaaggggaaactacctatctgccatgcaaattatgcttagtcctgaagaccagggaccactggacattgagtggctgatatcaccagctgataatcagaagatggatcaagtgatgattttatattctggaaacaaaatttatgatgattactatccagaactgaaaggccgagtacattttaagagaaatgatctcaaatctggtgatgcttcaataaatgtaacgaatttacagctgtcagatattggcacagatcagtgcaaagtgaaaaaagctcctggtgttgcaaataagattcagctggtagttcttgttaagccttcaggtacaagatgttatgttgatggatcagaagaaattggaagtgactttaaactaaaatgtgaaccaaaagaaggttcacttccattacagtatgagtggcaaaaattgtctgactcacagaaaatgcccacttcatggttagcagaaatgacttcatctgttatatctgtaaaaaaaatgcttcttctgagtactctgggacatacagctgtacatcagaaacggagtgggctctgatcagtgcctgttgcgtgtaaacgttgtccctccttcaaataaagctggactaattgcaggagccattataggaactttgcttgctctagtgctcattggtcttatcatcttttgctgtcgtaaaaagcgcagagaagaaaaatacgaaaagtaagttcatcacgatatcagggaagatgtgccgcctccaaagagccgtacatccgctgccagaagctgcataggcagtaatcattcatccctgggatccatgtctccttccaacatggaaggatattccaagactcagtataaacaagtaccgagggaagactttgaacgcactcctcagagtccgactctcccacctgctaaggtagctgcccctaatctaagtcgaatgggcgtgattcctgtgatgattcccgcacagagcaaggatgggtctatagtatagagcctccatacgtctcatctgtgctctccgtgttcctttccttttttgatatatgaaaacctattctggtctaaattttgttactagcctcaaaatgtatccaaaaataagttaatcaggagctgtaaggaatatatttttttaaatttttctttggttatatcgaaatagttacaggcattaaagttagtaaagacaagtttaccatctgaaaaagctggattttctttaagaggttgattataaaggtttctaaatttatcagtacctaagtaagatgtagcactttgaatatgaaatcataagtgaagacattggtgaacttacttgcataccaagttgatacttgagtaaccatctgaaagtggtacttgataatttttaccgttatttttaggatgtgtatctcatttatttatggcccactagtctcccccaaattagtacagaaacatccatgacaaaattacacatgtgtgtttgtacttgttttcacagctccttggaaaactctgtgttaggaatatctctaaaaacatagaaaactctacagtggtttagaaattactaattttacttctaagtcattcataaaccttgtctatgaaatgatttcttaaatatttagttgatagactgctacaggtaatagggacttagcaagctcttttatatgctaaaggagcatctatcagattaagttagaacatttgctgtcagccacatattgagatgacactaggtgcaatagcagggatagattttgttggtgagtggtctcatgccttgagatctgtggtggtctttaaaatggtggccagccagatcaaggatgtagtatctcatagttctggactaaatactggctttccactttaggtgatatttttcttattagaaaaatattataactcatttattgtttgacagttatagattgaaatttcctaattctaaattttaagtggttcttcagtttcagtgctttatgttgtttgttgttggtttggcatggcattacatattatatgttctagaaacatgtaatcctaaatttaccctcttgaatatgatccctagatgatatttttatcataaatgcagaataatcaaatatattttaagcaagtaagtgtcctccatcaattctgtattccagacgtgggaggatgtacagttgctgttgtgtgatcaagcatgtctctgtgtagttccagcaaatcaagctgagctttgaaaaagtttgagtcttagttttgtgaaagtggtttattctcaaaaaaaaaaaaaaagaaaaagaaaaagaaaaaagataagaagaaggagtaaagggactactcctccttgccaaatgtgctaaatatcattttaggagaagaaagtggatttattgtatttcccttaagattgtgagggagtgtggatacagtagaacgagccaacagtttctttataataaatacggtctgcaataaattatttcactagctgtaaaacctttccctagattttagtagggagttggtttctgttaatatctttggtgctgtggtggtaaatgctacattataaacagtggcatgtatttacagttagagtattgtgtgtacactttttaatggtaaacttaagctgaatgtgtaatggatttgtctatagttttacatatttggaagcattttaaaataggttttaatcttacataaaattacttttatacttgtgttaacattttcttctgtgccttttgggtaatttaatttctgttatgaatttctggtgcctatgagctagctatcacctacctgaaaggtgcttagaggtgaaggtactgtttctaaaaacacatcactgtgacacctttctatcctcacattttcaagcttgcctcttttctgttctttgtggatataacgtaagtgattgtgttattcataaagatttagaaatttcaatattcccaacactctgactatgtttctgattttataatagtagccatttttgaatgtcagatgtttggcctgttttatatgaataaagtttatttataaaatattataaaaataagtaaacagaacattaataataaaaaaagattttctgtatcttaagattatattttcagaaaacagaaacaatcttacctcttccttccctatatggatttcttttatttctttgtcttgtgtaattgatctggctaggcaattacacataatgttttcagcatttgtaattttacatcaaatccatccattgtaacacattgattgctacttttcaacttgtaaacctggacatttgtcactactcttcctccagtacaggagtccatggcgcggtgtgggccctgctgtgccacagtccagggcacggctgggcgcaggttctctcctgcaagagtccgcggctctgcagagcaagagttctccagtgccttagtccagggtgaggcaggggtgaggctccttcagtagctcagtccaggacgcagccctgcgagggtcctcctgtgcaggagtacacgatgctgcggggtcctactgtgccttagtccaggacgccagggggctgggtcctctgctgccatagtccagggcgcgaggggctgggtcctctggtgccatagtccatgacgcagggaggctgggtcctctggtgccatagtccaggatgcgaggggctgggtcctctgctgccatagtccagggcccgagggggctgggtcctctggtgccttagtccatgacgcagggaggctgggtcctctgctgccatagtccaggatgcgaggggctgggtcctctgctgccatagtccagggcgcgaggggctgggtcctctggtgccatagtccatgacgcagggaggctgggtcctctggtgccatagtccaggatgcgaggggctgggtcctctggcgccatagtccaagacgccagggggctgggtcctctggtgccttagtcccggtcgcggggagctgggtcctctggtgccatagtccagggtgcggtggaacaggagtcctgcggagcagtagtccagggcgcgctggggcgtggatcctcaggtgccacagtccagagcgcgacagggcgggattcctgccttgctatatccaaggtgcagcggggcgggggttctcttgttcaggagtccaggacgtggcagagccggagtcctccgtgtaggagtcctccggtgctggagtccagagcacagtgaggctgggtcctcccgtgccatagtgtagggcatggcgggacagggatcctgccctgcgatagtccagtgcttgagtccgcagtaaggcaatggtcctccaatgctggagttcacggcgttgtggggtcggggtcctttggtgacttagtccagggcgtaccagggcgggggtccacagttgccatagtgaggatcttggaggaaggtggttcctgccttgctgtagtccggggagcagggggcaggggtcctctcttgtcagagtctctggcgcggggtgggggtggaggtgggggttttcctatgcgatagcccacgggtcggtgaagccgggtcctcccgtgcctttgtccagggcgcaggggggcgagggtcttcggtggtggagtccgcggagcggcaggacgggggtcctccagtgccatattccagggcgcggcggagtgggggacctgtcctgcagtggtccagggcatgtgggagtggtggtcctgctgtgcctcagtccagtgcgcggtgggacggcggtcctgctgtgctgtagtgcaggacgcggtggcgcaggggtagtccagagagcgccgtggcagggggtcctccagtgctggaatccagtgcaaggcgggtcaggggtcttaccgtgccgaagtcggtggcaagggtcctcccgtgccatagtctagggggcgacggggcagggttctctagtgcaggtgtccagggtgtggcagggcaggagtcctcttgtgcaggagtccaggacgtagccgaggagtcctccaatgtcagagtccagggctctgcggggccgggttcccccatgccagagtgtagggcgcgttcaggtgagggtcttggcgtgcagtaatccagggtgcggtggggcaggggtagtccagacctccatggcgggcgtccctctgtgcaggagcccagtgcctggcggatcgggggtccttctgtgctgtagtccagggcaccgcaaggtgtgggtcctctggtgccctagtccagggggcggcgagtcagaggttctcccgtgtctcagtctagggcctggtaggactggggtcctggagtccacgtggtagcccaagttgccgcaggaccaggtactctggaaccacagtccagggcgctgaggggcaggagtagttcagggcgagccggggcccaggtcctcgggagccagagtccagggtgtggaggggtgggggttctgcagtggcacagtccaggacaccgcggggcgggacagggcggggatcctcccgtgccttagtccagggctgagccgcgggagaggtccttcagtagcacagtctagcgcacggcgttgcaggtgtcctccagtgcctgaggccacggcaggtcgcgggtcccactgtgctctagttcagggcggagtgggtctgaggtcttctcctgcctcagtctagggcgctggagagcggggatcctctggtaccggagtcaatggatccacgggtccgggtcctcccatgttttagccccgggaggggagaggcgggggtcttcctttgccctagtccaaggcattgtgaggccccgctcctgcattcttaactgtctgtgcctctgccgccgcggggtaaaactgcaccatctcaggcaagcctaacagagcagctgtccttaaaagattcccagttgagtgtcgttcggagcaggcctgagaagtgtgcccttagttggcttcaagggctctgggcagtgtttaaggaatccagctgacctcagttactccaagcccttttccacttgttttcttcaggcctcctttctttgtgccagcatcaatgggtttttggttaaagttttcagcagctgcctgcagttccatttttcttaccaggtaagagacatagcttcatgaaaacaaagggagaaggcttgtgaccagagaactcccagtcctctccctgcataggaaaactggacttctccggagggctccagctcctgggcaaatctctagggccacttaattgggctgtcccccacctttgtttctggttttggaggggccaaggttgggaatcctttctaagtctctacacatggagcccttctttggtgggatagtcttgacatataccaggattctcattgacctttcagagccttcaagaatcctgagctgctttggcttctgttcctggaagagatgcaactgaactgctctggagctggagttcaggttcaaatattcatcactgttactaagcctttacatagcatgtgatttctttccggcaggctcatggtcacttaggtttgcttgtatgtagatggagggtctgcatcctcattcaggtaacaccctcagcctttcatgctgagattagccattttatttgtaactcactgtacaatccatttgctcttccagtgtcccttagaaggatgcagagtgttctgtagaatgccatagagacctggatttagggaaaatatttgaccaaaagtctgccaactcacatgagtatctcccaacaacttgtacagtgctagtctctgggtatatagcaaatgaaaccgtgcctgagcagatgttacaaacaccctcccctgagagactccagggctgctttattcaagcaaaacggtgtgctctaataagctcagtgttgagaggaacaagttttcattccagctttctcaaaaactccctttgtgactttagacataataataataacactacctaggtagtgaacacctctgccaagaaatatcatgatcattacctgagttgtaattctcacagtagtcctgcaggacagctgctgttactgcttattatgcagatgggcaacctgaggctcagatggagttaagtggcttaattggtagcaacagagccaggatttgaacccagggctgcctgatcaccaaataaaattgtactcaacatgatgcacttaacttttctggcctcatttctctcacctgtaaaaatgcaggtttcagatgttggtaatattttacctgtggttgaaagagttaccagcccttccttgatcacccatggtaagacccatgagcctctgaatataattatagaaaacatttggagagggatagagagagacaagatcatgcctcctttgataatgtcaaattttcagtgcacgaagccatacatagtgcagttttctagcttccctttcacacatggcattgaagaaagtaaattaagcaactcagctaacactgggaatgcagcagaagtaatcgagttcagtgctgggagacagttgccatgatattccaacatggacaccaggatcacagtcgatgactatgccctcccttgaagatggtggcttgcctctctttctgtaagcacatgtcatgtcataacaatattaaacaattgaaagtaatgtccccatcttcttctacactgcctttgaattattattttagatctgccaaaataaattgcaaactcattaacaagaaagggggggtgcatgcatccttgccttcccgagtagtctattcacccaaagacaaaagggtgaccagcctccatctgggatattcaaagacacagtcaccttgccatgcagcctgaggccaatcccctttttaagaagcttgttagatgagctccttaaacatacaaccacaaaggaaaagcacagctggtgtgagcgaggctgataaaatgggcattttgtctgcttcaaggttagaatgcaacttgtctatcaaaatgtggttatctgacctccacaatgctgcagtccagctaaatcatgcaaatattcatccaccatttactatggataaaacaataatgtgctgtggggaatccaattacacacacacacacaaaagtgcacacacacatgcatgcacacacactgctcctgctgtctcagaggttccaggctggcaaggaagaagtgcaaacattagtaggtaagtccactagcaggaggaatgtgataagtagatccaacagggtacaacacagtatgatagaagcaaacaaggtagaaatgagttctgactccctttcacttatgaaactgattatggaatagtgtatgaaaggcttgcctgaatgaatctcatattttccaagtgttttctatcccagcgattggaactttcattcatttataccattgtccaaaaggaaaatacaggagattttcctaagaccatcctctgtcttatcgctcatatcatatccccaaacatcaccaagccctgcccacttttacctactcagtttctctccagttgttctgttttctccatatgcactagtggtaccttggctacatgaagaccaccagcagcagctgggacaaccagcaccctgtggaactgcacagcatgcatagaatacgtcctcccttcagttggcttgggtcagcttaggtcatgggccacttggactgatagcagtttccacagaaatgcctcaagatggtagaataatccagatctctttgcatggggcatggtgtggctatctgagaaaatcctggcttttataggaaggagaaagaagaatgcttcttgaggggaagaaaccaacaggaatgtgcctcagggaaatgtcaccagaggagagtgagctgtaataagtattttggcagattgcatgtttcttgtgttccttggccctgcacagagctaccgtttactcatttgacaaatatttgagtagtagactccagggttcaatagtgagcaaacatgcacagaatttcttctctagtggagctgagagtctaacagaaagagctgacattagtcacagaattatgtaataagggaaagttcagcagacccaggggtactacaagagcctgggaaggcggactgaccccaagagggaggcaggaaaggttgcccccaggaagtagcacttgagctacaatcagggagaaaactaggcaaagacacagcattcaggagaaggtagaagctggcccatgaggatggtggtgtggagaggtgaaccaatacccaggtcttggatttattgttgagctgctgaattaaccagtgctggctctctcccaacctctgcacttcttttttgcaaggttatatatttttttatttaaaagctagtatgagttgggatctgttgcttttctgagaccccatcctgtgaggtaaacagggggcctcactgtactctggggaagctaaagatggagaacagttttagagtgcctggagaagaggccctttaatagatcatttaagaagagggtgctaccgctagactgcccagattcactttctggctttgtgaccttgggctctctgtgtctgttttccaatctgaaaaatgaaataatgatagtatctgcctctgcctgcaagaccctgacctatcagaccaactaccttttcactagaactctcttcctgcactgtaccccaactggaccctcattaacacttaaaatgggcatgtttcccttttctagattttgctcaagacatttccctcatcagaattaactttggtccatctccctctattgaaattcaacccattctccagaaatcagttcaaattttatcaccagaaagcctctctcaattataccaagcctcttttatactttgtgccatttctgccatgatttcttatgttttcctttttcactacatattggtataggtacatatgatctccacttccactcaaatgtgaggttactgagggcaatccctatgggtatagtcatatcccaagagtcctgggcagagggtgtccctctttcacccaggttggagtgcagtagtgcgaccagagcttactgcagccttgacctcctgggttcaaatgatcctctcaccttagcctttccagtagctggtactaaaaggtgggcaccaccatgcttggctaattttcatatttttcatagagatggggttccaccacgttgtcttgcttggtctcaaagttctgagctcaagcaatccacctgcctcggcctctcaacatcctggaatgacagcatgagctaccacacctggccaaatgccgaatactttagtcatatatgcctgacacttccagggcatgcagaactgcctcgcttacttttcttttgacacagttaataaattttcttaatttaaattttaatttcaacatgtatacatctttgaaataaataaaataatctctttgaatgtttggcataatgtagaagaaattgacaaatggatatctttacttcattttccatctcaaaatgtggtagaaatatgctcccctaaagtgatcccaattattacatagccatcttgctgtggttaatgtagaatctttttgcaatatcacattcatgacagggcacatccaagaaacatttaagtgaagataatactagattcttgaaagtatctagacacttaagagcaggtagtgatgatgttaattaacagtaacaatgtcgagggactggcttttgcccttccctaataaacataaacagcatagaaactcagcaaatttgctcttattttcttcattatttggttgttgaatcagtaaatgctttccacaggggtcatcttgttagtcatcttgtcattttgctgtgtcccttcttcatccttgcactttttcctttctctcattttggcatgtattgagaggagtgttatgttgatggaatgccctatcctgacttgccatctgattagaacttccctcaatttttaaaatgcttcttgaaatggtttggatttgtgcaccccccatccccaatctcatgtggaattgtaattgccagtgttggaggagaggcttagtggaaggtgtttgcatcatggaggtggtttctaatggtttagcctcatcaccctagtgctgtctgatgataaagttctcccaagatctgcttgtttaaaaagtgtgtagcacctcccctgactcgtttcagccatgtgaatatgtgcttgcttccttttcacctctgccatgatcgtaagtttcctgaggcctccctataagcataagtctgtacagcccacagaactgtgagccaattcaatctcttttctttttcaattacccattctcaggtatgtctttatatcagtgtgagacagactaatacactcctcctcagaaagcattcaatttagctgtgtctaaaggtatgccagctgtcctggggcattatcttagccaatcattcttcctcttcagcaagatctatttgcctatcacagcttgacctgcagttcctgccatacttgtcagtaacaagtagcctataatatctggagggatttcattgaaatcacagaggttccttggctctttactttattaacaggcattaggaaagcacatcgactttcttatttaataaaatgcctgttgctttgaaaaattgctcaaaagaagaaaagagagggttacttaaagatatcactataggcatggcatgctggtccacacctgtaatccaagtactttgggaggctgaggagagaggatcacttgagtccagaagttcaataccagcctaggtgacatggcaaaaccccatctttacaaaacaaaacaaaatagaaaaaatattcaggcacagtggcatgtgcttgtattcccagttactcaggagactgaagtgggagaatcactgagcccagggaggttgaggctgcagtgagccatgatcgtgctgcccctctccaatctgggtgacagagcaagaccctgtctcaaaaaaaaaaaaaaaaaaaaaaaaggctatcactatactatctataactattcttcattaggataactaggtattttccaacagtggaaactccaaacagactaaattgttgtacatcaaggtgaattgtcatagttaattcctttgcttgcaactgtccaataaatggatgaggactcacttcaccaataaataagaaatgtgaacagcacatggggcctgtagatgccttttgcagggccctctttttctcttcctaaagttgcaatttgcgtgtttctgtagatgggcacatcatagaaactgtcatcctagatcagagcctggagagagagatacaagtgtcatgcttacatatgcagagtgggaacaagcccagagaaatcaagatgattaagcagaaagtttccatactggagataaaccagctgtgtaaaaaatcatgcttattgaacaaaaaagcattgcacagctgaaataactgctttaactaagaagtgaagaactgacacctgaacagagcacagatagccacacagacaggagctgcatttcaaacaaggtcattgctgttgtccccactccaaattaagtgtctctgcttcacccttccttaccaaagttctgcttgatcatccttttgttttgttttgttttgttttttgtacttcacttctttgagaaaatataaaccaaaattttacatgaaacaggaattcagcttttgacaatgttagccattgaaacaacaacaacaaaagtttctattatttctcatctctgtgctatccagtgcagtagccaatagccacaggtgactattaaaattaaaattaattcaaataaaacaaaatttaacattagctggtcagttgtactagccacatctcagttactcaatagccacatgtggctagtggctactgaactaggcagcatgaatgtagaacattttcatcatcatagctttctaggtcatggaaaaattgcagaactcaatttccagtgtgcacatttatttgcatgcctaggagctttctgaccctgtgttgagctgcctaaccagcttcctgattgacctcctgatatttctgcaaatgtggactaagaggccaggagtcctcagggcccaggtgactcaggttattcagtaattatgtttggactagcaggcctctacttaatttgggatgcaaaaggggacttctcttcctaattgctaaaatagcttttcaaggttcacctctcatcgtggtaagagtctcatttcctgagactcttatttctttccatgacttatgttatattctggagagagtggattcacatggaaaagctggctctgtgctggctttccaggggtcagccctcttgtgagtgacaagtctgcctatttacatgatgtacattgtgtcccactactggtaatagaagctcagcagctgattgactgttaggttattttcaaagctcaatattcacaataatctaacagacacccacacaaccacaaagacagacaaggctctcataacctgcaaaagacaaggtgcacatttcttctttccatcccagcaacaaattgccaacccagccagcacttaagttggggtaaaaattaattaaaagaagaatctaccaatgtagataaaagaacaaaaaagctattgcagctgtcttctccataacagaggcctgtgatttgaattttaatgtttcaatctactttctgctcttgtgtttattttattatttattttttgtcactatctcttatttgtagatacaaatttttcacatttaaaagctattttaaatataatctttaaaaggagaaacattattttttttaattgcacaaaatactgaaggtgagttccactgattggaatgcaaaatgggacaatatctctggaagcaattttatccagataaatcaatagctttaaaacaattcaaaaccttggacctaatacctctacttctaggaaggtagcctatgaaggtttctgctgaaggatgtttatcacagtattatttataatgcaaaaaagccaaagaggagacctgaaatgtttcaaagatgaaaatggtttgataaacaacatttttttagacggggtctcactctgttgcccaggctggggtgcagtgccacgatcttagctcactgcaaaatccatctcccaggttcaagcaattctcctgtctcagcctcccaagtggctgggaatacaggcacaccccaccaagcctcactatttttttgtattttagtagagatggggtttccctgtgttgcctaggctggactcaaactcctaagcttaggcaatccatctgtcttgaactcccaaaatgctgggattagaggcgtgagccactacacctggcaataaacaacatatttaaacactagaatattatgcaaaaattccaggcatgctttggaaaaactattaatcccacaaaagatgcttatgttattatacagactaagagaccaagattctccaggacacttactgtgttacatgtctgaagtacaatataatgctgtatataaaatgtgacctcaactcaggccccagtcttttcatctggaaaattctattaattatactgcccttcccctttttagattttctgtaggagttaaatacaatacactttgtcaattgcttaacaccatgctcaacactggtcagagagatataaatgtcagctattgtactatgtgccaaaaaaaaaaaacaaaaaaccacacagacagacacacacacacacacacaaagacacacatggagggagaggaagtaaagattagaaagcagcacataatgttatggtaggcaatgggaccactaatgattttcatattcttttttattttcttctttatactgcttacatttttcagtgtatacaatgagcatgtattacttctgtaaccagaagaatgtggtataaacctcaccttaatataataaaacaaaattactggccaggcacggtgtctcatgcctgtaatcctagcacattagaaagctgagactagtaaacctcttgagctcaagaatttgaaaccaacctgagcaatatagtgagaccttgtgtctgcaaaaaatgcaaaaattagccaaccatagtggtatagaactgtagtcctaagttacttgggaggctgaggtgggagggtggcttgagaccaggaggtggctgcagtgagctgtgattgcaccactgcactccagcctgggtgaaaaagccagacccagtcttatacaaaaatataaacaaatatacaaaatatacaaaaataaaaacaaacaaacaaaaaagttattacttagatcccacatgctgtcttggagccattgtagcattgcgggattcaagagactggagagaccaatggatgagacaggaggattttattaaagtggccactggcctagtggattcgcatccaaaaggctgagctccgaacaaagatggggcctggtttttaagcatgcagctgcgtgaaactcacagggcgggatggcaagcttatagaagcagaacaaaggcagttaatcaaacagtgacaggtgtatgactcaaacatgcctggtgacctctgctgggctgcccagcaggctctcagtggatggtcactattttaggcttgctcaggcatgtcttgtgaccttctcagtgttgcacagatggaaaacaggaacttacaaaatccttacaaacttacagaaatagttacaaaaataattatgagagcagagcaaagacatactggcctaggaaagaatctcaaagggggaagctgataagaagaacttatttttctcatccccgttcctggagtccgttccttctgtgctctgcttgaccttgtacataaagttagcttagtcctagcagggccttggagtgagtcagcctggtacaggcaggaatttaggtttttctccttttaatttctgcttttgtaagccagggttctgattgtcactgctgagaaagtaaagtgtgttcaggctgtccatggttctgggctcccttgggtctctgaggaggattgtcccctccatcacagagaatatcaggacactagcctgttcctagttatacttacacactcttctcatgttgtctatggagtggaggctgcagggagggtgacatcctagttagtcccaagtgccagactgcctgaagctcactgttaacaagtcctgccttggagaagaaggaagggtgtctttgtgaacctcccacctgggccaaagggaggccactctctcctctgcttctccccaaccttggtcttctgcactcctagtgaacctctcaccccctgcctacaggcctggaatctcaagaccatgatggcctctcatcacccctgaatccagagctttccctttacaaaggggaaactgagacctggagcagggctgatgttcagccagtgcacaagggaatagatgaattggtggtgaaatactgaaatagttccagggtggatggaaaggggccactgccctgaacatctctaccccccacctcagcccatcctccaggaccctgggtcagcaccaggagcatcaaagtggccaggattggctgaagcccatgctaatggctctgccagctcttctccccactagagagggcaggggaattcaggccatctggaggtagcgctgtgaccgtgtatgcagtagtcaaaccttgtgtgccaccatccctgactttgttgataagggcatcaggctacatccctctggtactcagtggtaagcatctaaaatcttaaagaaaaaatttaaaaagctttcaaaatataggacttaacatataagcctgcataaacatctctttagcagttgtccaactggtgcttctggttctgcctccccagagagtggatgacctgggccaccctccaccactgccccgtaaggccactggacacgcagcccatcagttctcttcacgtggtcatccccctttagatgggagaaaatacacctgcctcatttttgtaccttctgtgtggacattccatgacagagcttcactaaatgtatgatgaagaactgaatgaatgaatgaatgaatgaatatgagagcaaatgaatgaatggctcagatcctgggctggaaggctgtgtatgaggatggtgggtagaggagggtctgtttttcttgcctttaagtcattacttgtcattttggggcaggagcacaggctttgaatgccgactgactggactttaatcctggctttactagctgtgattgtgtgacctcgtacatgttacttaaaccctctgtgcctgtttctttatctgtaaaatggagacaataagatgacaaaggactgtggtaagaattaaatgctttaaaaaaatcgcagtttgtattaagtcctcaatagattgggtttagcatcatgagtgcatgtgtttctgcagcaatgctcatcttgggctggatggtacctacacagagaaagactctggcctcttctcacccacatgtatctgtcttatgcctggttcccattcccagatccttggaagatccatattgctgaaatggtgaagggtgatgggcacctcaggacaactaagcggctccccaaacatcttccccctcccaaactctcctgtggtctttagcatttaacaggaatctctcgacactctcaaggggtgatcttctcatggaagaccagtggggaggaggctgcaggaaaggtcaggcactgtgcacttacttccctgacagctgcaagtggttctgtttccaagcccatgggtcactatgaataaggcaagttatatgacataataatgtgattctttggtgcctcagtccacactggcactttaatactcctagagtggattgcatggtggtctatcaaaagatatgtctacctggaacttgtgaatgtgcctttatttggaaaacaatctgcagatgtaattaaatccagcaccttgagatgagggcatctcatcttggattaggatgggccctaaatccaatgacaagtatccttataagaaaagcggcaggtagggcagagtggctcaaacatataatcccaccactgaggaaggtcaagttgggaggatcgcttgaactccaggcgttcaagacctgcctgggcaacatggtaagaccctgtctctccaaaatatatataaaatataacagccaggcatgatggcacctgcctgtagtcccagctaccagctaatcaggaggctgaggtgacagcataccttgaatctgggagattgaggcttcagtgagctgtgatcatgacactgccctccagcctgggtggcccctggcccctccacaacctgcgctagaagagctgggccctggctctgggcaccatgcagcctctaaggtggggctgagcgccagttcctgccctcctgcagctggggaccaataccctgacttaggcgctgtggaggcttctggcccaagggtccgcactgctggtggcactggcagggtcagagtttgccacagctgctgctgcgcgccttgtgcaggttaccactgcagctgaacctacagcagaagcaggcagggctggtcccagacagcctgggggtctctaagtgcagggccctttcaccctagagtcagctctttcttgccggcacccatagcggggtgtgcaggcgctgggtacagggcagcagccaggaaatggctgagcggcctgttcccgccctcctgcagctggggcctgaccacctgaattagccgctgggcgaggtctggccctgggatccgcctggctggtgtaggagcacggtctggggttgcctccaaggctgctgcgtgcgccatgtgcaggcaagggtttcccagacagcctcagggtcatggagtggaccactgtcccagcctggagtccgctcttcctttgcctgctcccagagttccgggtcgcgggcactgggaactgtgccgccaaggggactgggccgagggcaaaggtttctgccctgctgcagctgcggggctgactgcctgaattaggcgctgaggcggcgttgtccctggtgtcctggctcttggtggtgcaggcaaagtgcccggttgctctgctgctgcggcgccgttgtacaggtggcagctgtagctgagttctcagtaggggccggcagggttggtcctagaaagcgtgaggatcgccgagtgcactgccctcccagcctagggtccactcttccttggcccgagcccagagctcggggtttcaggcgctgggccctgtgcagctgcccagaataggctgagcggcaggttcccgccctggcaagggatccagcagtggaatcctcactgctgttggctgcgggcaaggtcagcggggtttccatcgctgctggtgggagccacctggcggtggtagctgcaagtgagcgcgtggcagagactggcagggctggtcccagacaccctgagggtctctgggtgcatcgccctaccaccctagggtctgctcttccttagcctgctcccaggacgcggtgtacgagggctagactctgagcagcctccaggatggggctgagcagcggattcctgccctgctgcagctacagtctgaattaggcgccaccgcagtatctggccctggggtacgtgctactgggtggcatggacagagatgggggctgccacagctgctatggggctgagcagccgattctcgccctgctgcagcgggcgaccgctgcaatccccagcgctatgggaccgaccacctgacttagatgccttggaggcatccggtcctggggtcttgctgctggtgtctgcgggcagggtcacggctgccactactactgctgtgcgccatgggcaggtgccagctgcagctgagtccgaggcagatgctgtcagggctggtctgaggttgcctaagggtggctgagtgcaccacgcttccaccccagggtccgttattcctaggccggctcccagattgcagggttgtgggcgttggacactgtgcagccatgaggatctggttgggtgcagattcccgccctcctgcagctgagaagccaatctcataacaggcgctgcagtgacctctggctctgcggtccgcgctgctgctggagctggcagagaacagagctgccaccgctgctgcttccaggagtgtgcagctggcagctgcagctgagcccgtggcggaggctggaaggccttattccagaagccttgagggtccccgaatgcaccgccctcccaccctaaggtccagtcttccttgcccgcgcccagagagttggattgcaggcgctgagcacagtgcaggtgctgggatggggctaagctgaaagtttccgccctctggctgctgcggggccgacagcctgagttatgcgccgcggcggcttttggtcatgggatccgcactgccggtggcttgcacagggtcgggggctgccacagctgctatagttcaccgtgtgcacgtggcagccgcccctgagcccaccgctgaggctgcagggctggtccggtcccagacggcctgagggccatttgcccgcgcccagatccgggtggctgcgctgggcactgtgcagcctcccggaatccgctgaagggcacgttcccgctctcctacagctgtgggccgactgcctgattttggccactaggtggagtctggctctagggtttcgaggccgctggtgttggtgggcggagtccgggtttgccaccgctgcgctccatgagcaggtagcagctgcagcggagctttagaccgaggctggcagggctggccccagacggcctgagggtcagggagtgcagggtcctcccaccctaggtccgctcttcctttccccttacccagagcgggttgtgcgggctctgggctctgtgccggcgctgggctctgtgcagccgccgagatggggctgagcagcggatttcctccctgctgcagctggaggacgattacctgcactagccgctgaggcggcatctggccctgggttactgcagctggtgacgcgggcagggtcagggttggttgcaggtggcagctgctgctaaacccattgcgagcctcagggtcaccaagttcaccgtcctttcatcatagtatctgatctttggcccgcgcccagagtgcggactggcctgcgctggggactgcatagcttctgggggccggtcagcgccagtttcacgtcctcctgcagctgcgtggcctaaggtcttaggcgccgcggcgctatctggccctgctgtcgacgctgctggtggtggggacagggtcaagggttgccactgctgctcccgtgcgccatcggcaggtggcagttgcagatgagcccacaattgaggctgttggggctgctcccaggttgttagagggtcgccgagttcaccgacatgccaccctaggttacgctcttggcccgcacccagagcgccgggttacgggtcctgggccctgtgcagccacggggatggtgctgagtgcaggttcccgtcttcctgagatgcggggcgaccactggaattagcctctgtggtggtatctgaccctagggtccgagctgctggtggcgtgggcggggtcgaagtcgcctctgttgctgcggcgtgccatttgcaccgtcctctggtacaggctggtctgtgctgtgcatggtcaatgtagtcttctctgggcattcttcacagatatctgctggcatggctcatcttctctttgattttgcatgtattgtcacccactgatgaagtttctggtcacctgccattttcctctagccaccaagacctcacattctgaggccagcatgtcccaccaggggcctccactggccctgtcaaaccagttgtgagtccccctcccaccaagcttggagagactggcttttcagacagcactcacaagctgagagtaagggaattgatctcttaggcacttccccctgtcctgccactctgtcattcctggaacaccctatgtgcactagagaagtaagacatcagcctgcatattttctcatctttctttaactgtctattttttcctatctatctgtatgagtgagtcccaggaagatgttggggctgaatacctgatcagagacacaggcagagccatagtcacatctcctgggaactttcttcttcctgtgtaattaaaagctcttctcttcctcttgttcatagaaattccccttacactaaacctttgactgaaaccatcccctcagcttgataaaattttagacaggattatttctgattcttggctcctggcctcttttattagcatattttagaaatgttatcattgtaaattctctctctgcctctttgatatataaatctttttaagagcccatctgccagttttacacttcagaaatgtccatttcaaggacctcagagccattcctttgaaatgtaatcctcaagaaagataacaccattatctcccagactccataagagagtaagagccaaattatggtgggcatattgctctgatttgtaaaattaccttctgtcataaagataagatagtttaatgttcctttggaaaaagacaactgtcaaaaacaagtggcctatgatcaccccctcatcccagctcttaaaatctctactgctgtttgtttcagtggagctgagttcagactaagttctggcctctttgtccttttgcaatagccttcaataacagcttttttatgtgtttaactttgtctggtgcaattgttttctttgacactttccaccctaactagaacttccattaaagtcatagtaggattcaaggcagccaaactcgactcacatacgtaaaaaaacttcttaggatgtagaaacccatattctcttcaataaattgtttcttcagaccattgccttattaaaagtttctagttcttattttggcattgaaaagcagaacaccaatttttaaataagtctctgctcacttttaatttctgctataacaattttattgctttccatggctgaacaacgagaagaccagaacacaattttaaattaaattttatttaatttttactattacaattttatttctttctctgactgaaagaagaaaactcgaataaagtagtctagtgtataaagtgaagactagaacaaagaataatgtcttattaatacatttcagaaagttacctccatttaacatcaatggtgtcatttaatattcttaactttcctatcaagtagatgctattattatctctattttataggatattaagtcttatatattatacataaccagctgaaggtcatgtagcatgtagatatgataggaatacaaagaaacaatgacattagaagcagaggagggagaaggattacaaggctaaacctaggtcagttaagagaaaaagaaaaactaggagaagacaaattcttgttagaaaaaaaaaatgattgaggcagagcaagacagtggtgcagacctctccagctatcgtacccctatagaaacatcaatatgaacaactgtccacatgtgaaattaccattacaagagccaacagaacctcaatacatgaacaaggttatgaagcacctttagcctgtgaagatgggtgaaaccatggcttatgcagtgagagaaccaatactctgtgactgtgatactcttccctcaggccgttatggtaccatctgcagaaactcccacagggcttatagtttttacactgaagaaagtgagcaggagtttgatatttgttttttccactatattgagttctttcacagtagcctcactcctgtatcagcccacaagtggcaccatgagtgccaaaagggaagaaccacctgaggcatgttaatgacataagaggaggtggggccagcaacagccaccatgtgaaacataatacacagactctacaggcttgacggcctgacttgttctcccccatagccaggggctccctgtggatcacccatgggcccagccagcaaatgttgcatcagtggagccattggaagacttacgtctaacatgggatttgggctctctctaacgttaaactggaatacgatgataagtccactcaaaatttcttaataggcccacttaaaagtagtcacaagcaaacccagactgagaagactcaaataaacatctaattcatcaatgtgtagacagagatgtatatctacatataataatgatagcttaggaaaagttccctctccaaatggacaaaacaaggtgtcagcaactgaacttaaagacatacagatgaatgatctggcaggcaaataattcaaaatggctgtcttaagaagagcctgaacactgagaagcagagacacaattcagaaatttaccagagaaattcaacaaagaaatcaaaataatgggaaaaatcacatgtaaaccctggagcaggaaagttcaatgaacacattgaaaatccaacggaaggcatcaacagaaggaagaactgatcaagcagaagaaagaaacattgagctcaaacaacaggctctttgaaaatacatggtcagagtaaaatgaaaaaaaagaatgaaaagaaacaaagaaagtttatgagatttgtgggacaccaacaaaagaggaaatctacatatcattggtgttaaagtggaactaagaatgaaaaagagatagtttattcaaagaaataacagaaaactttttaaacctggagaaagattaaaatgtttaggatggtcaaagtgcccaatcatatttaatctgaataagacaaccaaagacatattataattaaactctcaaaggtcaaagacaaagagaagaccctgaaaggactaagaaaaaggaaacaacacataagagaattccattatgcctggcagcagacttctcagcagaagcactacaggccaggagagagtaggataatagattcaagtgctgaattaaaaaaactgtcaaccatgaataaagtatccagcatagctatcatttagaaataaaggagagattgaaacattctcagacaaacaaaaagcaaaggaattcattgtaatcaaacaagccttacaagaaatgctaaatattgttcttcaaactgaaaggaaatggcagcaatatgtagcacaaaaaatctgaaggtataaacccacagatagaagtgaggattcagacaaatttggaatgctctaatacggtaataattggatgtaaaccacttatatatccttagtaggaaggttaaaatacaatacaaataaaataataattacaataatttgttaaggaatagaaatatacaaagatgtaaattaagacatcaaaaatgcaaaatgtgagggagtgatgaagttaaagagtagagtggtttcttttcccctttttttgaatcaaaattaagttgctatctctttaaaataacttactgtaaccataaaatgttctttgcatgccttgtggtaaccacaaagcaaaaacttttaatagatactttaaaaattaaaaaaaaaagaaaccgaaacacactgatagagtaaatcacttaatcacaaaggaagatagtgaaatcaatcaatcaatcaaagtataaatttttaaaaaacatgaaaacaagtaataatatggcaggaccaagtccttgcctatgaataattatcttgtatgtaaatggattatcccatttaagacatataatggctacactgattaaaaacaagacctaactataaactttctacaggaaattcacttcatctgtaaatacacacataaattgaaagtgatcagatggaaaaatatatttcataaatatggaaaccaaaagaaagccggtatagatatatttatatcagataacatatacttcaagcaaaatcctataaaaacagacaaatatggccattatataatgataaaggggtcaatatcacaagataatataattgtaaatatatatgccctctatattgaagcccctaaatatataaaccaaacattaatagatctaacaggagaaacagcaagcaataaaataatagtaagaaatctaaacattccactttcagcaataaacagattatcaagacagaagatcaacaaagaaacatcatatttaaaatgaactctagaccaaataacttagtagtcatttacagaacatgttatccaacaattgcataattcacagtcttctctactgcgcatggaacattttccatgatggatcatatattaggcacaaaatgagccttagcaaattcaaaaaagatcaaaattatatcacgtcttttctgacaatatagaataaaactagaaataaacaacaagaacttcagaaattgtgcaaatacatacaaattaaacaatgtgtccttaaacaatgggttaaaaaataaattttgtttcattttaaaatttcttaagacaaatgaaaatgaaatcagaacatataaaaacttaagaaatacagcaaaaaaagtcctcagagggaagtttgcagaaatacatttctatatgaaaaaaagaaaactctcattaataacttaagaatgtatttcaaggaatcatagaaacatgaacaaactaagccccaaattggtaaaaaagaatacaaataataaagaatagagcacaaataaacaaaatggagacaaaaatatgaaagatcaatgaaatgaaaagttattttttgaaaagataaacacaatcgatatgtatttagtcagattaagaaaaagagaagattcacataaataaaatcagatgaaaaaagacattgaaatggttactacagaaatacaaagaatcatgagaaagtactacaattatatgccaataaattagaaaacatagaagaaataaataagtttctgaacacatataacctatcaaaattgaagaatgaagaaacacaaaatgcaaacagaccaataacaaataatgagattgaagcattgtctctcaatacaagaaaatctggagggcctgtcacagtatctcacacatgtaaactcacactttggaggccatggcaagaggattacttgaagccagaagttccagattagcctggggaacatagtgagacccagtctttacaaaaataaaaataaaaattagccaggtgtagtggtgtgcacttgcagtcctaacaacgggaggatgaggcaggaggatcactgaagtccaggaatttgaggctgcagtgagctatgattgcaccactgcactccagcctgagtgacagaggaagaccctgtctctaaaccaaaaatatttaataagaagaagaagaagaaagaaagaacaaaagaaagaaagagaaagaaagaaagaaagagaaagaaagaaagaaagaaagaaagaaagaaagaaagaaagaaagaaagagaaagaaagaaagaaaagaaaagaaaagtaaagttcaggatccgatgcttacactgctgaattcttcaaaacatttaaagaggaacttatagtaattatttacaaattattacaaaaaaagtgaaaaggaggaaactcttccaaactcattctatgaagacacaattaccatattccaaaatgagacaagaacagtaaaaaactaaactacaggccaatatcactgatgaacatgaatgcaacaattcaaaaccagcaatgctagcaatcataatttggaagtgcattaaaaagatgattcaccataatcaggttgtatttgttccagggaggcaaggagggcttatgatatgtcaatcaataaatgtgatacaccacatttgataagggaagataaaaaaatagtcatttaaatagatacagaaaaagtatttgacaaaattcaatgttttttgtaaacataagatctcttaacaaattagttataaaaagaacatagctccataaaataaaggccatatatgataacccacagccaacatgatactgaataaggaaaaattgaaaactgtgtctctaaggtctagaacaagacaaggatgttcactttaataacttctcttcaacatagcactggaagtcctagccagagcaattaggccagcaaaagaaaagacatccaaattgaaaaacaaaaataaagtcaaattgtccctgtttgcagatgacatgatcttatgtataaaaaaccctaaatactctactgaaaaaacagaaatagtaaatgaatacagtaaagttttagaatacaaaatcagcatagaaaaatcagtcgcatttctatacccaacagcataccatctgaaaaaggaatcaagaaaccaatcccatttaaaatagctataaaaaaatgcctgggaataaactaagccaaataaatatgtctaaaatgaaaactataaaacattgataaaaatcaattgaaaaagatacaaataaagggaaagttatcccatttttatgaattagaagtattaatactgttaaaatgaccatcatactcaaatcagtctataggtccaatacaatctctaacaaatttccaatgtaattcttcagagatgttaaaaaaggttttaaaaatcgttctgcggatgttaaaaggatttttaaaacgcttttttcgttctgcaggcgaaggctgtggccgtgctcccgccggccagttcccagcagcagcgcattgcccctgctccacgccttcgctccaggcccgcaggggcgcagccccgcgggaatcagcactgagccggtcccgccgccgccccagtgtccgggctgcgactgcggggagccgatcgcccagcgattggaggagggcgacgaggccttccgccagagcgagtaccagaaagcagccgggctcttccgctccacgctggcccggctggcgcagcccgaccgcggtcagtgcctgaggctggggaacgcgctggcccgcgccgaccgcctcccggtggccctgggcgcgttctgtgtcgccctgcggctcgaggcgctgcggccggaggagctgggagagctggcagagctggcgggcggcctggtgtgccccggcctgcgcgaacggccactgttcacggggaagccgggcggcgagcttgaggcgccaggctagggagggccggccctggagcccggcgcgccccgcgacctgctcggctgcccgcggctgctgcacaagccggtgacactgccctgcgggctcacggtctgcaagcgctgcgtggagccggggccgagcggccacaggcgctgcgcgtgaacgtggtgctgagccgcaagctggagaggtgcttcccggccaagtgcccgctgctcaggctggagggtcaggcgcggagcctgcagcgccagcagcagcccgaggccgcgctgctcaggtgcgaccaggccctgtagctgtgacttggctgtggggctggcccgcctccctgacccctgtcaggcggagcagctggagctgacccacgggcctgggctttcgagcgctttgtccaggcgctaatgatgggaaggtgaaaggtgggggtggccacaccctgcagtcagggtggcaggtgtcagaggccacatgcaacccactggttttgtcttttccaggatgctgataagtttcccgcggcccccggagcagctctgtaaggccctgtaattgcctttcgttcccttctgctctattgaggagtgggaagatgacaaagtgtttttgctcaacccgaaggaaaatgcacatgggaggacacaccgggttactatttgagtagcccagacaggagagcagcggtctgcttcagccatgagaccacctcaggcgaaaatagacttgtggttgttttacttcttttcaccaaatgggtctttttggggtttgtggtgtgtcccatgtaacgatgatctcttggttcccctttctcattcacacccgggagctgaggtggggggtggggggcagggagtggccacctgcgccaggtgtgagagaagccacacctgagaccagcccctctgtcctcctgcctctgcatcgagcgtccctgcaggaggcagaaggggtgaaaagtagcctcgatattaaagtgcttgtgtgtccctgagggggtaagcaagtcacagtcgggacactggttcctgtcatcaggtgtagcacaaagaaggaccccaggacatggggtgcagaagggagcacagagagggtgggtgctactggggtgcacaggcagcttgaggaggatgcagatggcaaacttccctttgtcacgccaggtgcatgtttagggccggaggaccaccagatccccaaagcctccggtgcttctgaggcagaggagaggcaaggccagtggctaccggtgtccagggacctggcagccaccactgaggcctatctgcttgtccctcagcccactggcggccacactccaggtctctgggctctgcctaggacgtgtgtttgggcttctctcccgagcagaaatcatctgcgtaccctctgcatcccatggatttgctttgtttctgagggaataattaaggaatgttagtatgacatccgaaaatagctaattatggtgaagagctaacagggcgatctgggaagttgtggagctctagttagtgatgacagaagaggaacatatttgactgttttgtgctacacccaggttctcaggaggtggcaagggaggagacttggcactgtgccatgctcagaacccctggtcccagggactctgtttccctgtgggagtttggatgagagacagttggctgggaagctcagggtggagtgaggaagaacaagttgaggttcttgggttggaaagatctagtaccccaggaggggctggatgtggcctgcgcccaccccaaactcacacactctgtcatgctcacacagacacacacactcacacacactcataggcccaagctcacacaccacacttacatggcttattcacacacttacacacattaacacacatacgcactcatatttacacatccacacgcagttatattccacatacacactcatactcccaagttcaaacaccattatttcttcacaaacattcacacaataactcacatacacactctcacacatgtacacactcacccacacactctccattacacacatttacctgtctgttctcacacacatgcacaaacacaaagccaaattagagccattttcctggtcccacacaaagaaaactgatacctcagtttcttggtcttgaccagaactgggtgcatgattccatccaaccacaaggtggggtgggaatgaaatcctatcacgtcctcaggccgtggagaaaaaaaaaaaaaactatgtcaggcctctctaatgcctcccacaaatgagcaggagggattgaaacagaaaaggggttcctcctgacatgtggcattgatggagcccggttctgcctcatgccaagccctgccttgcccctcgatgatggaaaatggttgtgtgtcttgtttcctggcccccatctctgtctcggtacagagtagagatttgagtctcagtttcaaagacaggagtcccactaagctgacccacccactgacagatgaaatcttgccatctgctgaccaagttccccaaggccccttgagactcaatttctgaagagggtctgctcagaattccccgtccccatgatctgcccggctgtcgggacactggtgagcctgctcagtggggagtcccttttcagctcagtcagcaagcggctcttctctataaagaggcaggggatgaacctcctctctagttttagcagcagaggccatgagacccatggcagaggccagagctgtgcaggctgtaggaggtaccatgtcagggatttcaaacggaggaaggtactttccagagagtactgcagggaaccaagccatatccaccgtagctgcaataaagcctctgaggctcagcttaaactcaatcttagaaatgaagtcccagcacaagctttgcaggataagcaaaatctagagaagagaaaatgcagacccagtcaatgataaatataagtcatctggaccagcacagagcagatacagtgccttctccacatgcagtgaatgaggttctcacgtctgttagtgtgtggaattgaacatcagtatcagaatcattctgtgttacctacagctggttttatgttgttatgcctgtcacctgatgaatgtgtatctttagccaaccctttcaccccaaagctcctgccccaacccctcctcctggaagtgcccatcgctggtctcggcaggaggctgttcttcccagcctgtggggtggccaccttgcaggctgtaaccctctacaagaaataaagtcttctctccttttccaaatttcgatattcacttaatccttagcttctatttttcaagattttaaactgcttttaggtcatggcctcttctctgtagggtctggaggctgagagatgttcagcaggaaagagctgctaactaattccagtagcactgctcttctgcctaacggaggtgtttaaatgttgattttggcaaaatctatgagcaggttgctccccatctcccgagatctctcacaatactttgtaaaacccaatttagcgcatcgtctgtgagagcagcttttactggttctgcagcgatcttccttactcataatctattgaaatattgtaaagcgatgcagatttgtggcatgtgaggagagcatgtagacacacactccgctgtgattcaaagtgccctaacaccttcctcttccctacaggctgtgataggagggtgctctgggtcactgaagaaggggagtcataaaggagcagaggccccacgtcgtgagtgccatctctccttgagtgtggcctcttgttctagcccacaggcccaccatggtctgactaaatgctggcactgctcatacatccacttttaaaaattgagttgaacatgagaacatgatcattcatattttatccatttgcatgtattcaataacatcctttccctgttctcatctctgctttactgcctttttctttaaagaatgaatgtttccatgttttatatccacagaatttctggcttttccctttggagtccaaggagcaagggcagaatgaggaacaggatgtttcttacagactcatgaggccgcagcacagaaactgcaagaaatgtcagtcataaagtgtcccagtgcattttaaattgatgattattaaaatccttctttatctataggggatctaaaaaattaaacaactcataatttaaacacggttgccaggtagcctgagtcaaaaatcaggagaggctctgtggtctgaagtctcctattgctcaccttgatgagggtctagttgcctaatgggttggtgtaatgatgtcattcaacacaagcaaaacacaactcccttggagttgttcaaaaaatcaggaaatagaaaaaaaataagggagaataaaatattgacaggagagaaaaatgaagagttacttggagatttgaaggaggtgaaatgggcaaaaagtaaatttagcaactagaatttaaagtcagtggataattaagtcgaataatttattcttatgtccatgtactttggttttaaagttttgattaatactcattcaacactaatttctaacaaattagaatatttccacattgtctatttttaccagtgagcttgtaataaagatccgctagtaattttagtacatcataacctttcaaaagaagcccatagaataaactaatttttaaagagtcacattttattcaatgtctatttatacatgttactagcaataaactcttttatctttaattttgagaagctttacaaatacagaaaagtagaatgactaatagagccggtagccaggactcagattggaaaaataggtctaatcggttgttacactgtgtttatgtcatacatttcacttatttttatcaaataaaaattagaatttataaaatgttgattaaaaggaaaacagtaaagtttagtcccatgtttcttcctccaaatctctttgttctacattaacaggtcaggagaagtatggatggggaggctggaaaaggggcatccttccccatgcggtccccagagccaccttctccaagcaggacttggggaacaacctcctccatccaggacctaaggggtgtccttttctgtgcttccttggatggcagcctttcctgtgcagtcattcagaaagtcaggctgacacatgttgtcgtcttgaactctgggtgaatcccttcatgtttatagtgatttaccattaaatcactgtgccgttttttcctaaaatatatggggcgtgttttttgttctgagttatcttagtcctttggtcgctagctccagttttttgtaatttcttttgcaacctaatatgtgtcccatttggtaagtattacatatactagaaaatgacgtatattcagcatttgttgtgattttaaaaccttttataaacacgtaacatctttgtctatttcccgtttaaattcagaagtatgggttccagcgtccctctctagacctgctctatcctgttagtttctttgtatgtcctggaggcgaggccagcattggacttgacgttgcttcacctactcggttctattgtccatccatgtgcagtgtctatcctgttgtttattatttcttccttaaattttatttgaactaaattaattttgtgatagcagcttgctttctgtgaatatttacttaaaatttttataaaatttttatttttttatttctttaatttgaaagtgctgctttgttattgataattttgtattttaatatatgaggttaatccctctatgtttggtaggaaaaagtgatatatttgaacttatttctatcatttgattttggattttgtatttgcaaagctttatcctcaattctcttttccttttttcagatttcttttcttttctctttttttggggggacagagttttgctcttattgcccaggctggagtgcaatggggagatctcagctcaccacaacctccgcctcttgggttcaagcaattcttctgccacagcctccaagtaactgggattacaggaatggaccaccatacccggctaattttgtatttttagtacagacagagtttctccatgttggtcaggatggtctcgaactcccgacctcaggtgatccacccaccttggcctcccaaagtgctgggattacaggcatgagccaccacgcccggacttccagatttattttccatcaacatttcattttccacttccttcctatgctggcttgcaggctttccaggctatttacctttatttagtgtcaaaaattcttttgggaacttttgagttgtcaaccaatagttgtaagcatattggatattgctgtttttctcctggtgctctggttataatctctcctattaatacctgtagtcttattgttgtagttattttttctattgatttctgagatataataattagaattgtcaaattgtggatttatgcatttatctttttaattcaataacttttgcttcatgtattttgctgtgtttcttaggtgcatgcatgcttatgcttattaggttttctaagcaaatgggcttattggtataaaacatccttctttatccctggtgatgcttgtctttcttgcagtgtgtcttacctgccattaatacactggctgcagtttttgataaaaaagattgcatagtgtatatttgtccatcttttcagttcgaatctatttatatctttatctcataagtgtatttctttttaaaagtggatattgaggtttcctttttacctactttgacagtctgtgttccgccttcctgatcttcttctggattattgcagttttggtttgtttgtttgttttatggggttttcttttttttttttagtatggattttgtaccctgttttttttttttaactatgactttgtttcatttatttatttttggtgagttgttcagaaattaaaatataaatacttaatgtatattaaatatcataacactgtatataaaatataaaaaccttaccttaccatcctctcatcttttgtgccatgttgtcatagatttttcttctgtacgtgttgtaattcctggaggatgtcatccaaacagtaatttcccctccacatatttactatttttggcacattttcatcttttctgtgaactagaatttccaattattatttttcttcatcctgatcaagtttcttttgcatttatcgtggtttgggttcgatggcaacacagtctcacagactttctttaactgaaaatgtacttttctcaacttcagttctgaaggctgcttcagcaggttcagaattctagggacacttttgactttgaacagcatctctgggtaccatctaacatattattatatccagttgtgtcaaatctgtcatcggccatagaaccctttgacaggtgcttcttgttgcttcagttctaagtatttcatagtcttcagagacatggagaagtagcagtgctagtaacagtactagtgaaaccaggttaagccctaaaataattaagaagccattgcatgcacacacgtgaacgtttgacttcagctaaaatgctttcaaatgtactattttatctttatacaaggccataacacaaattacaattttaaaaatactttcactttacatatgtgaaaactgcagctcaaagaatttaaaagacaagattgaaatcccatgagtaggtaaagatggtcaagtctggagcccgcatgtcttggtgccccccacaccctgttacagagagtgcgaggcttcaccagaaagctctttcggctcaaggattagctctggggaagtgcagcaggcaggcctgctttgcaaccttttttccagcagaaatccaatgtttgttcacgtttctagttcttttagttttgttttgtttcttaccagtatggctctgggagttatttacaaaatttaattttaaaagagacactccccatcattagggttccttggaaacttataaaaaaataaataaatactggtagatgagaaacttctgcaaaattgttagttatatgtgtaatacatctaattgtaactaaagaaatgtgtattacggtaataatttaatttattattgtcattttcttgccagatttgagggcatttttttaagctctccacatgtggtttactgtggaccaaacactggcagcttcaggcttacaatctgctgacaaatccttcttagttcgttcactttgaagaatgtgagcatgcactgctcatgtgcgtggcaagcatgcaacctgatcaggagaaggacagtggccactcacgtcatcaggtgaacttgtgacgaggccatcaagaggctgcacatgtgctccagaaaatgaaattcccactatcaacctattttccatttccacccaatggcccacccctgctccaaagccgtgtctccacctcttaggaatgcttgattttcagtattgctgaacaggggtcaaagaaaacaaactgaacaaagaaacaaataaagcctttaacccgggagcaaagacacagcacctccccactccgcaacagctccagagctgcacagctgctgccagagcctgagcacaggcctgaactctggcccatggatctcaccaatgcatttcttccctctgtgccaaaaaaagtatcgataaatgggattcatttacttgggacgtaaaataatgtatacctatagttttctcccagaactgtgtaaaccggcatgctgtctgccacaatacagtcctcaccctgcatcaggagctcagatgggggaagccagcagggctggatgcctgagagtcacaggtgcttggaggggagagaaaagcaccacggagagccaggccctgcctacaagtcacatttctaggggtctaatggtctgggcaggctgggagatgctctctaaaggaaaggcaagaaatattgccccacgtctcccaccaccaaacagaaagtgcaggtggtcagccccagggctcacctgccctttgccagggtcatgagtcaggcccaggctgcgccctccacacaatcctcaaggagagttcctgccaggctgggacaactgcactgggacctgatgccctgggaaggacagggttgcatttaacagaaacagctaaacctgaagggatgagtttgcctttccccggggccatgggatggtttatagaaagttctacccatcaggacaagacctcacatgacaccatcagaggaactgatttcacgccacagagggaggaagagggcacatgccataggtccactggtcacagcacacacatgctcctgggagcttcagacccagcagtgtggcacaggtgccaggtcaggatgtgggaggacacagtgtctgcatgaatctgtcacctttgttagctgccttgtcccaccaggtagaagatgtggcaattggagcacagcagtaggaagcccagtgtcccccaaccttccacatcatacccaggacctctgaggtgcatctatatcctgcacatctaggctctgaaaagcaggaggtcctggtttccacagctgtggggcttctagccagggcagggccaggttctctgaaaaaaacaagctctgggtgctgctttgtcctcaggctgctcctccatgggacctgcgggcagaaaaatgggtaccacctggaccatggtgtcagcaggagcagggctgcgctgcctggggaagaaagggctccacgcaagtacctcctggtacacagcacttgatggcatgtggacaagtgcgggagccctagaccaaggactctgtggtgggcaaggctgagggccccttaggggtgagggcctgggttacaccaccagggggtcaccaggaccctcagcagaaggtggagggggtggtgatcattacctgtgcaaccctgagatgggtggcagccacagaacctagggttcattgaaccccccttttgtaactagtgcccaggaaaaggcctagaatttaataaagacaaggcccctgtcagtggagtgctggatggggcgcaccccctggggcacacctgaacctcccccagggccttggctgtgagctttgattgtagacacacctatgccacggccccttcagactgctcccttcacctctgaaaaaccaaacaggatgcttctgttcctggaaacgtgaatgcccttcgtgtgttttttactttgactagaaactcatctgcagctgaaatatatgcagagacctcgtgtgctcccaagatttccaggcatctctgagagtttgcttttcagttcccagaaggtgtgagagctccaaagcatgtgctgctggtttctcaacttagtgtattttagctccctgtggacagcatgtttctagcccccttgcacacgcttggatcggatttttgaaaaagccaagggtgggaggcagaatgatgtggaatgggcagaaactatgactaaaggctggcctcatcccaggaggagatagaatgcattagcccagtgacagtgccagggaacccatgcggcagcctagggaaggtcatggaatggagctggggtttcggctgtcaccatcccagggttagactcagccaggtgaacagctgattctcctccacagaacccttgggctggcacaaaacatgcaattcacagtgagagaaagaccattcctgtccaccccttgtagcctccacacacctgagcccatacctgacatatcccagaacaagactccacagccatgcatctgttctctccagggcatttcatgatgagagagggatttacttaatatgatgaaaatagaagaggaaatgaccttgacaagtacatagttccacacccgccatccagggcctaggaatagtgctcagccagggcccggcccttctagggctctgggaagctgcagtgaaggtggggttgggacaagcaagagtggccatttgcaggcagtgtgggcaccaggccatctgcaggggaaaagcccagtgggaggatgagacgacagcagaaacctcgcaggggctatgcaccccctccccgtgggaaggggataccctcccaggtggagccactgtttacattgaaatcactcaagtccatcaccaggaaacacaaagaggactgtcttgccagagattagtgatctgggacttaaacaaaatgccagtcagcaaatgagaggattcttagttccacaggcctcatgtctatagttgcagtaagcaagactgaactcagccatgctcacctgcagacactgagatgcttgctaggaggctgtggggtggaatacaagacacgagggctgacaaggatgggaagagcatccctttcctggctaggggccttggccaattcaaaaatagataacatggggtctcagagctcctgaggcaagagctacgtaggcattcagagatacctggatgatggcattgtcttcagtagaaccttgaaaaagcaccagggactcccaggcaacttagcttaaatctgtcttgagtagagctggtctttgggatctccatcaagtgggtgatgcctttaccaccatgatagcacattataaagttggccttgctagcagcagggacaggcctgatgtcactgatcctgaggcaagcatcttataaacccatataatttaattttgcaaaggctcaagctcatcactgagatcatcctttgtatgatgatccatgaggccaccgtgaacagcatggatggacccaggccatggaggggccctcttcatcctggatgaggagcccacagtggccattgcccctcagtcagaataaaatcaagacaaaagcaatcagaagacccatacaccatgaggctgagccatttttcaaagatgtcaaaataggaaaatactaaaatggaagaaaacccagaatcccatcccctgacttgctccagaggcctccccaactccaggccaccaggagcaggggccctgcagaggaactctccctgggtagaaattcgctggtttttgccttccaccagatgttggcaacttcaatttcatcttttttggcattagagctaatgttaaaatgactcaggtcaaaaaagagtgatgtgctgcagccctgacaatgctcccagtgagaatttgtgcaaaactcttccctggatctacaaaaccaggtccaggcagggtgttggggctgtgacgactgcatctctgcctcctcctctctgcagtgcggcctcttcacaggcagagcattcattcctctttagcttctcaccagcccaggatgcagggaagaagtagcttatcagcacagtcttggaatatttttaccttaccagctgggctcctatgaacaatgtgtccagctataggtaaacaatgtgtgcaaataatgtgagagtgacagcaccatgtcagaaccatgcaagaagctggccagaggcacaagcagcagatgggatgctgatgggggtgaccaaaatacagtatggggcagctgcgtgccatgatcaatctgcaggggtagggaaaaaaataactctcggcctggctaacatttgcatgtgagaacattgacccaagtccccaggagaacgttgaagagaaccgcggcttattgtcaaagggaaaagtaaccgcagagttttctttctgcttctaagcagatgggaggggtgtagcctgcagaaccaagggtgtgggggtcctagaatgttgttggtggttgttcagcaaagggcttcacttctcggcctgcagaactttccgcccgtgagtgtgggttacatctatacatacacaggaaatcatatactcccactcagccacccacatctaaacatggtagtattaggaaaaataggaaagcaacatcctactagattacattgtttacagtgaaaccatttaaacccctgaccctctgtgtcaccaattaacactgcgtgtaaggagaatgcctgccccgtgggggtttgtaaagacaaaatgtaaaaataaaatgtaggctgggtgcgatggctcacgcctgtaatcccagcactttgggaggccgaggagcacggatcacgagatcaggagatcgagaccatcttggctaacatggtgaaaccctgtctctactaaaaaaataaataaataaataaataataaattataaaataaaatgtagtgtgcttggtaaactaaagttctaaataaatattagttgttactattactatgtcagaagtactagtcacaagactggaatacttcacttgaataagaactcagtgcaaagaagttggacaaatcggtgagtttgaaactgcaacaggactaaaaatatgccaattaatttattaatgtattcatatttattaacttatttatattcaaatgaattaaatatttagtgcatgcttggacctgggaacacacagccatcagtgccacacgaactctgtcctcactgcagttgttttcagatgacctcagaggaaaataagagggaaaccactggcaatttccttccgttgataccttagctgactacatagctcatgttaggtcggtcttaatgaggaaatcagaatattcggggtttcagtattaaaactacaaatctctatagcaagcattcagagctctttggattagacatcagtggctgcagtaatgttacctgagaaacccacacactttctgaacactggcatgagtatcctttcctttcggtccactatatatggaaaaacactttcacccatcaccctaagtgtcccaaactgcagaagaggcagatagtagccagctagtccctgtcaaaggcccattgcctttttctgggtcagcctggtccacccagcctgaggtgctctctgagacagcctagccaccacgccacatgcccttcagcctaatcagagcatcaggatgctgtgcacggccattagctggggtgactcagaattatctgctgtagaacagggctctgagtgaaggatgtggtcactcagaccacgtagatggttcaagctcttactcctctgtcagctcagagcctgcacagtggaaaggaagtgcatctattgatttcttggccaaaagaactagttaatacatttttaaaaactttgacattttgttttaaagcaacagtgggccttgtttaactaaaatctcatttctccagcctaattttgctggaaaggccccaaaccaaggcaagcccctggaggagagagagcagctaggatgctggcaccagatggctttgttccccagccttcaatatactcagttagaaaataaccacatcagaggtttgataagattatcccccaggccatttttcaggtctaaatgttaccatattttatacgagaatacggtatttgaatcaactctcaggggacccagccttcaggagacactgaaggaatacagacattttttctagcttcaaaagcatggtttgcaaactggcttgttctttgccggagaaaaccacacacgtggccattgacgcccttgattggcagagttgatgggattttctctggctctcaccttgagggcatcatcagcatcctgaagtcacttgcaggcctctgtgcagatgtcctttcgaggggcttcaggctgtggaagtgaccagtgaacacaggacctgcctggactcccagcctcacagcacagcaccacagcctggactgccctctgcctgatacttgcttggtttggaactttactccatcaaagcatccaaataaaaatatgtagactccccaccctatcccatctgctatagggttctaattcccccacagccatcccatcacagtgctttcccccatgacgggggacccctgccctggactccatccctcccctactggaaaagcacaggtgctgtggcatgagttcaaccgactgaaattccctgatcttcacagtaataattctaaaatagggcaacaatacccctgtcagtgttcttggaagaacctctcattacttgaggccccagaaatgcaaacaccctcctgttttccagtgtgctgtcaaccctggcatcagagctgttcctgccatggacactggtaattgacttactggagaaagtcaagcttttaagtcccaggaataaagggttcctatttccttaagctgtgtttatttttacaccattgctggtagagtcaatgtgtactgagtgaagatgaggcaaaagtgtcaaagagtgatttccaataagatgaaaagtgatctgcagtttccacttccttaaccagcaggaaacgtctctcctgtagcatcggacagtggaggcagtggcgctcagtgtggggcctcctggctgaaggaggggacaatatggtgtcccatctcccgagatgctgtatgcacctcacctggctggtgatttacttgaaagaaacccatgtgtggagtagggagtgctgcctttggcatctacccatgtcctgctctggactctgcctcttagcaagggtgacttgtgggcccaactcacctggtggctgtgagccactgcactccagcctgggcaacagagtgaggccttgtgtgaaaataaaataaaataaaatataaaaataaaaatgagccaggaatggtggctcacggctgtaatcccagcactttgggaagccgagacaggcggatcacatgtggtcaggagttggcgactagcctgatcaacatggagaaacgctgtctctactaaaaatacaaaaaattaacctggtgttgtggctcatgcctgtaatcccagctactcaggaggctgaggcaggagagtcgcttgaacccaggaggtggaggttgcagtgagccaagttcccgccattacactccagcctgggcaacaaaagcgaaactccgtctcaaaaaataaaataaaagactttaagtcattcatcaattttatgtatctactatttcttctcccattccataaagcctacagtcatacaacagaaagggaaaatcaggacagccacatataaataaaggtgcaaagttgaggcaggagtggaccttaagggccaagcagaggtcattgctgagccctggtcatttagccctgggctttctggaagccagagtgaaaagagagacacaatcagctgcataagagttatcaaaaagcaggaagcgcgctggttttcctggtactaaagcaagggctttccaagaatttacctctaaagtaatttcttttgttctttcttttttctcgctctgacacccagttggagtgcagtggcacaatcagggctcactacaacgtctgcctcccaggctcaagccatcctcccacctcagcctctcaaatagctgggactacaggcacgcaccaccatgcctggccagttttttggtattttttgtagaggtgggattttgccatgttgcgtaggctggtctggaactcctgagttcaagcaatccacccaccttggcctcctaaagtgctgggatttcaggcatgagacactgcgcccagcctaaagtaatttcttacttgagattttatttcaggctactgtgtcatgcactgggcagtacagcctggtgggtgagagcacagtggttttttttgttttgttttgttttgtttgtcttctgggtttgggtttgaattttaatacgtgcaatttattctgtgcttcactttcttcatctgtaacatggagataacggcgtctacctattaaagttgtgaagattcaattagatgagttgtatgaataagtgttagctgttattttattttatttatttttttgagacagagtctcgctctgcgcccaggctggagtgcagtgacgcaatcttggcccatggcaacctccgcctcccgggttcaagctattctcctgcctcagcctcccaattagctgggattacaggcgcctgccatcatgcccggctaatttttgcatttttagtagatccgggttttcaccatgttggccaggctggtctcgaacacctgacctctggtgatccacccgcctcagcctctcaaagtgctgggattacagccgtgggtcactgcgcccagccagctatcaagaaatccgactgcctactacttagcctgcacagtttcaggtgctggggaaatagtgatgaacaagacaaacaagatcctcatcttcaagtagcttttacattctaagtggagtgaaaaaacaataaacattgaaaataaatttcagaaagtgctgtggaaaaactttacaacagatgcaggaatagatttcatttgactagttctcccagtttccagaaaaatcaagggtagaatgttaaaaggcaactcagaggtgaatctgttagggcctacggtaatgcaatcctggtttgtggaattccgcaggctagtgtgggtaggttacaattttggggggagggctttattttgtttgaaaattcacttcttcccgctaagcttttgattaggagctgaagttgaatcagtttgaaattgtattctggatcgagtgcggtgcttcatgcctgtaatcccagtgctttgggaggccgaggtgggtggattgcttgagcccaggagttcgagaccagcctggacaaaatggcagaaactccatgtctacaaaaaatacaaaaattagccgggcatgatgttctgcgcctgtagtcccagctactcaggaggctgaggtgggaggatcgcttgagcccaggaggcggagtttgcagtgagctgagatgtcactgcattccagcctgggagacagagccagactctgtctcaaaagaaaaaaagaaaaaaaaaaaagaaaagaaaaaacgaaattgtattctgaatacatcttctaaaacactacatttacttgcactatattaaactggttttatcctgaccacaattgcaggtgaaagataccactgttgttctatttttctggtaagtagagtgagccatgtcttccccagggaaagacgcctcctaaaaatttgtaggaccacctttggttttcttccagatattttttttgtcatcgcttttcctgcgcccaattcccatctgtctagcccttctgcctccgctggtctttttcgcgagcctctccccagccgcaggtattcgtctgggctgcagcccctcccatctcctggggcgtgaccacctgtccaggccccgcccccgtccaacccgcggagacccgcccccttccccggacaccgggttcagcgcccgagcgtgcgagcgcgtccccgctcgtcgcccggctcggcgtcgggagcgcgctctgtgtggtcgctgctgcagtgttgttgtggctgtgagaaggcggcggcggcggcggagcagcagccggaccagactccctagtagctcaggcgctgccctgcgccggccctggcagggagcctggtgagatggtggaggaggaggctgtgccgtggctggccttgctgtgtcctgctgcctggttagaaccccatccccgtcccccgtctcctccggggggtgaggaggagctggaagaggggccggcctctgtccggcccggccaggcggcagtcaccctctgaggaggcagcgcccggggaggggcctcccaggcggccgccgccgccagggggaggcgctgggagtgggagtgggagcgggacctcagctgccaagctcggcccggaccctaggtgcgggggaggcggggtcccgggctcgggctgcctgcccggacctggcggggatgggcccgtgcggctccgggtgtgggacgtaccctcagagcgcccggggttattcccactgactccagggaggtgagtgtgcgcccttcgctccctgccgtgtctgtgagggtccatcgttgccggagactggaggtcgggggccatgggagccccggggcgaacggtgcggacatgggccttgtggaaaggaggagtgaccgcctgagcgtgcagcaggacatcttcctgacctggtaataattaggtgagaaggatggttgggggcggtcggcgtaactcagggaacactggtcaggctgctccccaaacgattacggtgttatttctccggtagaaattttgcttggtgtatggcacttccggacccataagatgatgtcagttgtattttgggctggaaaaattatgtcaaaattatggggtagattttatggacacattaatagactcccctggagtttgataatctcacttgtgagttttggacatgaactactattacatattgatgttcgaatgtcgtttccagacccagacctaaattcttactgttctagtatcttgatatccactttgttttctgacatctatttttccacaacccaaacaaacaaaaccccaaaaccatatacttttccagttgaggttcaactttctcacagtaaatccctgcccatctgggattacaggagtaatagcaacacagtgtgtgtttatagatagcagcaataatacatttattatatataatataataaatgtattaatattatatatttgtatatatacaaatatatataattacatatatttattaaatatataagtaaaaatttattatatataaattttaatttatatataaaattacatatatagtaatatgtattgaaatacatattactataaatgtaatatgtattgaaatacatattactataaatgtaatatgtatttcatttgtgtatatgtcaatatacacaaatggaagcaatgactacgtaataagtgctaagtcttttttgttcttgttgttttgagatcaagtgtcactcttgtttcccaggctggagtgcaatggtgcaatctcggctactgcaaccactgctgcccgagttcaatcgattctcccctcagcctcccaagtagctgggattacaggtgtgtgccaccacacccggctaatttttgtatttttagtaattttccccagtgtgtggcttggcttttcactctctaaatggtgtcttttgatgaacagaaattgttaattttatgaaagtttaatttatcaattatggttagttatagttatgtacaatttggaaaatcattgcctatcccaacattataaaaataatgtcctacattcttttttaagaggttacattattttacatttctcagcagggtctcagatctagttgatgtgattttttcaaatcacaaactcacttttgtatagggtttgaggaggggtcaaaataaatttttcctcatagatatccagttgatccagcaccttttattgaaaaggccattcctcacactaaattgtagtagtgcttttgtcaaaaatcaggtgactgtatatagaaaggtctgtttctgatctgttttctgttttattattctaggtgtccatgcttgttctaataccttactatttgatttactttagctttataccaagttttgatgtttaatcatgtaaatcctcaacctttgttctttttcaaagttatcttggctattaaattcttggtatttctaaatatagttttaaaacagtgtcagacaatgcttttttattatttaaagatgagatactaagtacctgaacacaatgacaaattctatgatcttctgaaactaacctccgggtgtgagaatttgaaggttagtggatagaagatggccgaataggaacagctccgatctgcagctcccagtgagaccaacacagaaaacaggtgatttctgcatttccaaatgaggtacctggttcatcatcattggcactggttggacagtgggtgcagcccacagagggtgagttgaagcagggcagtgtgtcacctcatccgggaaatgcaaggggtcaggagatttcctttacctatccaagggaagctgtgacagactgtacttggaaaaatggtacacttctgcctaaatactgtgcttttcccatggtcttagcaaccagcagaccaggagattccctcccatgtctggctcagtggatcccacgcccatggagccttgctcactgctagcacagcaatctgagattgacctgagaggctgcagccgggtggagggaggggggtctgctattgctgaggcttcagtaggtaaagaaagcagccggaaagctcaaactgggtggagcccaccacagctcaacaatgcctactgcctctataggctccacctctttggacagggcatagctgaacaaaaggcagcagacaacttcttcagacttaaacatccctgtctgacagctctgagagagaagtggttcttccagcatggtgttggaactctgagaatggacagactgcctccttaagggggcccctgatccccgtatagcctgactgggagacatctcccagtaggggccgacagatacctcatacaggtgggtgcccctctgcgatgaagcttccagaggaaggatcaggcagcaatacttgctcttctgcagcctctgctggtgatgcccaggcaaacagggtctggagtggacctccagcaaactccaacagacatgcagctgagaggcctgttagaaggaaaactaacaaacagaaaggaatagcatcaatatcaacaaaaaggacatccacattaaaaccccatctgtaggtcaccaacatcaaagaccaaaggtagataaaatcacaaagatggggagaaaccagagcagaaaagatgaaaattccaaaaacctaagcacttcttcttgtccaaaggatcgcagctcctcaccagcaacagaacaaaactggacagagaatgactttgatgaattgacagaagtaggcttcagaaggtcggtaataacaaacttctctgagctaaaggagcatgttctaacccactggaaggaagctaaaactcttgaaaacaggttagatgaatggctaactagaataaatagtgtaaagaagaccttaaatgacctgatggagatgaaaaccacagcatgagaacttcgtgacgcatgcacaagcatcaatagctgattcaatcaagtggaagaaaggatatcagtgattgaagatcaaattaatgaaataaagtgagaagacaagattagagaaaaaagagtagaaagaaatgaacaaagcctccaaaaaatatgggactatgtgaatagaccaaatctacatttgattggtgtacctgaaagtgacagggagaatggaaccaagttagaaaatattcttcaggatattatccaggagaatttccccaacctggcaaggcaggccaacatgcaaattcaggaaatacagagaatacaacaaagatactccacgagaagagcaactccaagacacataattgtcagattcaccaaggttgaaatgaaggaaaaaatgttaagggcagccagagagaaaggtcgggttacccacaaagagaaaaccatcagactaacagcggatgtctcagcagaaaccctacaggccagaagagtgggggccaatatccaacattcttaaagaaaagaattttcaacccagaatttcatatccagccaaactacgcatcataagtgaaggataaataaaatcctttacatacaagcaaatgctgagagattttgtcaccatcaggcctgccttacaagaggtcctgaaggaagcaataaacatggaaatgaacaatcagtaccagccactgcaaaaacatgccaaattgcaaaggccatctacactatgaagaaattacatcaactaaggggtaaagtaaccagcaaacataataatgacaggatcaaattcacacataacactattaaatgtaaatgggcaaaatgccccaattaaaagacacagacttgcaaattggataaacagtcaaaaccatcagtgtgctgtattcaggaggcccatttcacatgcagagacacacataggctcaaaataaagggatggaggaagatctaccaagcaaatggaaagcaaaaaaagcaggggttgccatcctaatctctgataaaacagactaaaccaacaaagatcgaaagagacaaggtcattacataatggtaaagggatcaattgaacaagaagagctaactattctaaatatatatgcacctaatacaggagcacccagattcataaagcaagtccttagagacctacaaagagacttagactccgatgcaataataatgggagacttcaacaccccaatctcaatagtagatcaatgagacagaagtttagcaaggatatccaggatgtgaactcagctctgcaccacatggacctaaatagatatctacagaattctccaccccaactcaatagaatatatattcttctcagcaccacatcacacttattctaaaattgaccacataattggaggtgaaacattcctcagcaaatgtaaaagtacagaaatcacaacaaactgtctgtcagaccacagtgccatcaaattagaactcaggattaagaaactcactcaaaactacacaatgacatggtaactgaagaacctgttcctgagtgactactggataaaaaatgaaatgaaggcagaaataaatatgttctttgaaacaacataccagaatctctgggacacatgtaaagcagtatgtagagggaaatttatcgtactaaatgcccacaagagaaagcaggaaagatctaaaatcaacagcctaacatcaaaattaaaagaactggagaagccagagtaaacaaattcaaaagctagcagaaggcaagaaataactaagatcagagcagaactgaaggagatggagatacaaaaaaccgttccaaaaatcaatgaatccaggaggtggttttttgaaaagatcaacaatagatagactgctagcaagactaataaagaagaaaagagagaagaatcaaatatgctcaataaaaatgataaaggggatatcaccaccaatctcacagaaatatgaactaccatcagagaatactataaacacctctatgcaaataaactagaaaatctagaagaaatggataaattcctggacatacacaccctcccaagacagaactaggaagaagttgaatctctgaatacaccaataacaggttctgaaattgaggcaataattaatagcataccaaccaaaaaaagtccaagaccagatggattcacagctgaattctaccagaggtacaaagaggagctggtaccatgccttctgaaactattccaatcaatagaaaaagagggaatcctccctaactcattttatgaggccaacatcatcctgataccaaagcctggcagagacacaacaaaaaaagagaaatttagaccaatatccctgatgaacatcagtgccaaaatcctcaataaaatactggcaaaccaaatccagcagcacatcaaaaagcttatccaccatgatcaagtgggcttcatccctgggatgcaaggctggttcaacgtacacaaattaataaatgtaatccatcacttaaacagaaccaatgacaaaaaccacatgattatctcaatagatgcagaaaaggccttcgacaaaattcaacagcccttcatgctaaaaactctcaataaactaggtattgatggaatgtatctcaaaataataagagatatttaaaacccacagccaacaccatatcgaatgggcaaaagctggaagcattccctttgaaaaccaccacaagacaaggatgccctctctcaccactcatgttcaacatagtgttggaagtcctggccagggcaatcaggcaagagaaagaaataaagggtattcaattaggaaattaggaagtccaattgtccctatttgcagatgacatgattgtatatttagaaaaccccaccgtctcagccgaaaatctccttaagctgataagcaacttcagcaaagtctcaggatacaaaatcaatgtgcaaaaatcataagcattcctataatgttgccggaagtcagggaccccaaacagagggaccggctggagctgcagcagaggaacataaattgtgaagatttcatggacatttatctgttcccaaaattaatacgtttataatttctaacacctgtctatactgcaatctctgaacataaattgtgacgatttcagggacatttatcagttcccaaatagtactctttgaatttcttatgccagtctttactttaatctcttaattctgttatcttcctaagctgaaaatgtacatcacctcaggaccactattgtacaaattgattgtagaatatgtgtgtttgaacaatatgaaatctgattgtaaaacatgggcgtttgaacaatatgaaatcagtgcaccttgaaaacgaacagaataacagcgattttagggaagaagggaagacaaccaaaggtctgactgcctgcggggtcaggcagaatagagccatatttttcttcttgcagagagcctataaacagatgtgcaagtaggagagatatcgctgaattcttttcccagcaaagaatattaataattgataccctggggaaggaatggattcctggggggaggtctataaacagctgctctgggagtgtctgtcttatgcggttgagataaggactgaaatacgccctggtctcctgcagtaccctcaggcttattagggtggggaaaagatcccgccctggtaagtttgaggtcagaccagttctctgctctcaaaccctgttttctgttgtttaagatgtttatcaagacaatatgtgcacagctgaacatagaccctcatcagtaactctaattttgccctttgccttgtgatctttattgccctttaaagcatgtgatcttcgtgatatactccctgttcatacatgctctccccttttaaagtccttaataaaaaccggctggttttgtggctcagggggacatcacggacctattgttatgtgatgtcacccccagaggcccagctgtaaaattcctgtctttgtactctttttctttatttctcaggccagccgacacttagggaaaatagaacctacattgaaatattgggggctggttcccccgatactataaaccagtaacagacaaacagagagccaaatcatgagtgaactcccattcacaattgttacaaagagaataaaatacctaggaatccaacttacaagggatgtgaaggacctcttcaaggagaactacaaaccactgctcaatgaaataaaagaggacaaaaacaaatggaagaacattccatggtcatggataggaagaatcaacatcatgaaaatggccatactgcccaaggtaatttacagattcaatgccatccccatcaagctaccaatgacttttttcacagcattggaaaaactattttaaagttcatatggaaccaaaaaagagcccacctagccaagacaatcctaagcaaacagagcaaagctggaggcctcacgctacctgacttcaaacaatactgcaaggctaccgtaaccaaaacagcatggtactgttaccaaaacaggttatatagaccaatggaacagaaaagaggcctcagaagtaacaccacacatctacaaccatctgatcatggcaaacctgacaaaaacaagcaacagggaaaaaattccctatttaataaatggtgttaggaaaactggctagccatatatagaaagctgaaactgggtccctttcttacaccttatacaaaaattaactcaagatggattaaaaacttaaacgttagacctaaaaaccataaaaaccctagaagaaaacctagacaataccattcaggacataggcaagggcaaagacttcatgactaaaacaccaaaagcaatggcaacaaaagccaaaatagacaaatgggatctaattaaactaaagagcttctgcacagcaaaagaaatatcatcagagtgaacaggcaacctacatattgggtgaaaattttgcaatctacctatctgacgaagggctaatatccggaatctacaaagaactcaaacaaatttacaagaaaaaaaacaaccccatcaaaaagtgggcaaaggatatgaacagacagttctcaaaagagacatttatgcagccaacagacacatgaaaaaatgctcatcattactggtcatcagagaaatgcaaatcaaaacaacaatgagataccatctcatgccagttagaatggcaaccattaaaaagttaggaaacaacagatgctggagaggatgtggagaaataggaaagcttttacactgttggtgggagtgtaaatgagtttaaccattggggaagacagtgtggtgattggtgattcctcaaggatccagaactagaaataacatttgacccagcaatcccattaccgggtatatacccaaaggattataaatcatgctactgtaaagacacatacacacgtatgtttattgcggcactcttcacaatagcaaagacttggaaccaacccaaatgtccatcagtgatagcctgggttaagaaaatgtggcacatatacaccatggaatactatatagtcataaaaaaggatgagttcatgttctttgtagagacatggatgaagctggaaaccatcattctcagcaaactatcacaaggacagaaaaccaaacactgcatgttctcactcataggtgggaattgaacaatgagaacacatggacacaggaaggggaacatcacacaccggggcctattggggggtgggcagctgggagagggatagcattaggagaaatacctaatgtaaatgatgagttgatgggtgcagcaaaccaacgtggcacatgtatacctatttaacaaacctgcactttgtgcaaatgtaccctagaacttaaagtctaataataaaaaaaacaaatttagtggacaaagtgagtagctatcttttctgctttcatctcactaaacctagtttaataatcagattgcaataacataataaattttatagtaagattgtatgtaattacctatatattggaagacaagggaaaatttataactgtgagtgctgatgaagctaacatattacctgcattttgaagtgtgaatgaacattcaacaggaatgcacttatttcatggaataagatgtaagatgtaagagatatgaaagaaaaatatgagtaatgtaataagtaatgctttaaaaaaaagtagggaagccattaatgtactgtgactgttacattatgttcaaaatgagaactaaagccatattcaacagatgcctcccacacttttatcatactcttcttatatctgtacttttttttttttttttgagacagagtctctctctgtcaccaaggctggagtgcgatggcgtgatctcaactcactgcaacctccgcctcctggggtcaagtgattctccttcctcagcctctcgagtagctgggattacatgcatgtgccaccatgcccagctaattttttgtatttttagtagagatggggtttcaccatgctggccaggctggtctcaaattcctgacctcatgaaccgcccgtctcagcctcctaaagtgctgggattacaggcatgagccaccatgcccggtcttagatctgtactttctaacagagcaacacaaccagcatttctaacaaatgctgcaaatcttaaagacgatggtgttcagcataatctaagaatacagagcataaaaacctattttggaaaaaatattaaaagcataatggtaaaattcaacacttatttttagaacctactgtgtgccaggcactttaaaaaatgtttttaatacaaggatgagcaaaattggtgaaatctctgcccctgtggagtgtccagtctaatgaaaaaaacagcaagttaagaagcaaatgcataatatagtgttaggttgtgataagggctatgtggaaaaaataaagtgtggttgaatatagaatgacacaatgtgtgtgtgtagagagtattgttggagagaaggctcagaagtgaaagaaatgatgaaagaaccacaccaatatctgatgcaagagggaatagccaatcagaagccttaaggctgcaagagctgggaggtttaataaacagcaagaaaaatagtgccaaagtgatatagagtggcagagggaaaagtagtaagtaacagatacaaaagataagcagggcctagattccctgtggcctgggagataatggtgaagacttatggatttgtttcatgtggtgaaaatctgttgtagaatttgagcaggaaatgatgtgatctgatctacgtttttgaaagaatcattctggctcctgtttggaaaatagctgggattgggttggaaaaaaaaaaagtaatggaaatagagggaacaatcagaaatgactgctgtaatttagaagagagataacggaaacatggcctcgggtagtatctacaaaaaaggtgagaactcgatttaggatgtgttgtgaaggtaaagttgacaggctttgccaatagaatggatttggagtgtgtaaaacatagggaatccaggctgatttttaaattgagggccagagccactggatagttagagatgatatttccactaagactggaagtgagggggagcatcatatttggggcagggaggaatcaaagtttctgttttgagtggttaaattcagaatgcttctcagatatcccagaggaggtgttaatttggcagtcaagtatctgaatctggacacagaggggaggtcaaggctggatgtgttagtttagaaataaccagcatttgggtaagattaaaacctatgatataggataaaattatctagagagagcatttactcagagaactctcaatattcaggaacacaagcctatccagactggctcaggataaataaagttttatgtagaagacaaatagttgcccatgtagaaccaaagaaaaggcgcaaataaatacaagcccatcatctctcttggttacatagaatacatgaggcagtaaaggataaggattaaactttcaagatgtgaatgtcttgaattcagatgtcaaacagaaatgaatttgaatctgtttcccaccagccaaatgagtgtttgatgaagatgaccatgatgatgataatgacttacatttcttaatgtttcccgtatgtatgtaggacttttaaacttgttccagtacaggtagggaaagaaaattcacattagtttattcacacacatatagagagagttggggtatctgcgtgctgcccaggctgggcatttgagcccattcctgggctcaaataatcctcctgcctaggtctcccaaagtgctgggattacaggcatgatccactgtgccctgccctaaatatattttatatatagcaggtaataaaacaagaacatgaggattacaatttttaatcacagagggaaagattttgtgagaataacataatttcatattcaaacagcaagtctttagctaattctttgattaaagtattgacaaaaccattttgaaaaatgtttctgaggcacttttacctgtgaagttttgaaagatctacacttttttttttttaatgttttttttttttattatactcttaagttttagggaacatgtgcacattgtgcaggttagttacatatgtatacatgtgccatgctggtgcgctgcacccactaacatgtcatctagcattaggtatatctcccaatgctatccctcccccctcccccgaccccaccacagtccccagagtgtgatattccccttcctgtgtccatgtgatctcattgttcaattcccacctatgagtgagaatatgcggtgtttggttttttgttcttgcgatagtttactgagaatgatggtttccaatttcatccatgtccctacaaaggacatgaactcatcatcattttttatggctgcatagtattccatggtgtatatgtgccacattttcttaatccagtctatcattgttggacatttgggttggttccaagtctttgctattgtgaatagtgccacaataaacatacgtgtgcatgtgtctttatagcagcatgatttatagtcctttgggtatatacccagtaatgggatggctgggtcaaatggtatttctagttctagatccctgaggaaaaaaaaaaaaaaaaaaaaaaaaaaaaagagaataggcacagaagtgaatttgccttgtaaacttgacttctgagctgcataaatattttacgtaattacaaaacaaaaaataaaaaagcaatttttacaaatcttgtgtgttcagttaggagcacaccttcacagagaggaactcttcccaatggctttaaggcacaattgttgttgtttttaaaaatatcttaaataaatttttatttttatagatttagagggtacaagtgcaggattgttacatggataaattgtgtggtagtgaaatctggggcttttagaagacacagtaatttgactctccatccctagtgcacaaaaaagaattaaacaatttccagtattcaggatccaaatgaagttcatacagtgattgtttgaaataacttttaagtctcttataatccatatttccacatttctttctttctttttttaatttatacatttttctgcttattgaagaaaactagttatcctgtagtttttcctacagtctgaattttgctgttgcatcaccataatatagaaataaaaatgatgtatgatatttatgagctaattggaaatgtgaacatagactggttatttaatgatattaagaaattattgtttattttgtcaggtgagactatactgtggtcttattaaaatgagatatatactgaagaaaaaaaaaaaaaaaagaaagatctacacttggtaaatttagcatcttttaatttttcttcccctacagtaattacaaaattctggagggggaaaaatgtaatattctccaggagtgagaatggaagacaatactttgagctatactagacataatcatttttgtacatgcactttcagaagaggtcccatgctgtggactgaacttgaaacgaaatacagtaattgtctctggcattaaatacccataggcatatttttacaagaacatacattagtatatgcctgctagatacataacaatgtgtgagtatattttaagagaatcttaatgtgactaacaaatagcaatcaaattgttcacaatttcaggctcaaaattgaaaagaagaggaattttttttactaaaaaattatatacacagaaagagtgattcaaagttgagcattaatgcaaattaggatgaaatacgagaagtaatccttgccaaccatctgcctagcttctccccacttctacccttccctagcaggggtgagctattttacctcctggggagatgggaaatgacagagagtgagaggctaatcagaagtttcaagcacccccttctctaaaagcaggaggctgttggtgagtactggaattttgtttttctaatttggtcttgaggtttctctctggaaaatggctgtgaattctaaccctgcactgaaagggctccagtatttgggtcatggatgtctacagtgacttctttatcctagtggatggcctaatgcctaagtgttgcctagtgcctaagcgtccaacccatgaccaggtgtcccactcacaggaaacatgcttataccagcaggcaccctcgtggctcttgtctgacctatgtccagtttatttctaccaagatatccattgtctaggagagctttcccttggaaagaaactaggttcaggtgtgtcagtcaggtgagatgcagaggaggcgatgcaacaaaaaccacacaataataggaggagtttattacttacagattagagaaaagggcagcactccttgcagagctgatgggaaagcagagccattccagatatacatgctctaccagaaccacaaagtgcagagcaaaagagagagtgagggacctgtgtgctaaagcttttattggagtccagggtattattaggtgggtttccatgggagttctaatttgcgagtttaaagcaagctgttccaagtcctatgtggccacgctgttactgagaggttgtcgctgcagcatatctgtacagtctatgggggatggaggagtcagtggggtaagccaataggtggtacctaactgtcccttagggaaggtggtcaacagcagacaattgtataagggagatatctggattgaccatattaaggaactgggatgaaacagagaactggaaattgtgccaagggtgactaaaccatgtttcttgtatgagaaagtccaacttatattcaaaatgaatgccaaggcaatataaaattacaggaattcactaccatgcacccccatgctcctgaattttcaagtccagactccctatatgtagctgataatatgggtgccaagtaatctggaaattcctggaatttctgctgctaattggaaatcccagcccatttctttcaaggtaatctgtctttgggtccaaagtcagcattttatgacacttaggtgctctcatcaaaggtgtgtgtatgaaatggcttaaggaaaaaatagacacagaacagcttgcctttgccctgtagagctctcaggtaggttcaacccatcctgggaattggagtgatttcagatactctgaatgcctttggttcccaaactgccatgggcttgctggtggaacaaaaacagaccttgatacccttactatgaattatatatatgattggctaactgaaagcaaaaccataatggaacatgactgcagacacgtatatattctccaggggttccatgttttgttggggaaaacatatctcaccaggtgaatggcctcaatggctgaaggcagcatgaaccctaaactcttagatacttggataattcattgggaacaacaacagacagagttgaagctagtctttaagaatattccctacaagccagcacaggcaaaaatctttcaggtataaaattctcttctttcttactgtagtgtatctttggcaacatgggtatacagactatggaaagcttaagaatgtaagttacattttagtagctctgttggtggaatatatatgtgtccaaagagctttcttaattggatgtgggcttaccctgttctactttagtccagattccttgttattaagctttttattgctgcagcatattctctaaatataatttactcctgataataattaatcaacattacagaagaaagctataaatataaggtgataatataaaatatatatttatatgtcatatattacatagtaaataaaatacatgttaaatcaaaataaaatagtattataggctaaaatatatatgtacacataaacatttagtgtaaatgtgcatataaaaggagaaaaaaggaaatacattaagatgataatactgtaggtaggtagggagattttggtagtttactttttcacatattccaaaatatttaattactattttataacttacataaattgtagaataacttctcttgtttagtaacagcatagagaggggtaaaactggcagaaatggatatgtttgatcaatgttgatccttcaaactacagtgatccacttctgagaacagggactcatatttaatgagggagtaagccaggttcttacagagcgtgagattcagcttctcctgtcatgagatggggtcaggctctgggccaggagagcaatggccagctttggaagctatatctcaggtcacattcaaaagcacacatttccaactcttttcccaacgctgcttttgtcacattagaatgaaatttgccctctgtgttgaaatattctataaaaaacacaatcttgcttaagttaaaatttaaagttagcttgtctgacagctgggatgtaaagagacagtgaaaggattctgacttttggcattgtcagcagtttcccttgagagtggagccctgtctttctgcaacctgcagctctcgctttcctgctgtgactgagccagtgggatcgtcggccaggagagggcgcctcactcagtgagacataaatccaacgcaccctatgagggcactaggaaggtgaaacgcaatcctcacctacacttgctctgctctctgccgtttcagcattccaccttagggcgtcaggcttaactttgcaggtgttaaatctccgtgtgtccatgaaacacttcaagtactatttcagcagcttggagaaatcccaaacacaagtcaggaagttatctccgtcagaggcttgccgcctcacccctgcatggctctcagagaaagcttcctttctgtaagacacattccaatcatcacactgtggctaaaaggctaaatataggagagacatttgccaagatatagcaaagccgatgttggtttgcctaggcaatttgataaatgatgattgtgtgcaggtggtgcctaaatagaccatagactacatattaagataacttatgaggtctgctggagagaatgggaaagtgggtgtgtgtggatgtttggcacagcctggggctatggctataagaacctgagtctaggatttgccatagaatattctgtgagcaaaaaagacacctacttctcagttataatcctcataagaatttttataatattttttaagctgtgcaatccacagctgtgtaactgagaaaaatcacttaacctgtctgaacctaggtttcctcaaatatattcagtctgcactcccaggacctcactttaagagaaacctgaatctcttgagcacgagcatgtggatgggtgttattcccttcctgcacaccttctgtgcttcaaagagagaacttatgtaacctttttcctcatgtatccctgctttgaaacctgtaaatttctatctttctctgcccctttctgacttcttttattattattttcaacctcatcgatttcttcaaattactttccatccactaaatatttctaatgagccctgtacatttttctgtaccactgtggaaaaaaagtaaaataatttctgtcttaacaaaggattgccgcacccatctggcattaaaaggaagaagaaaaagcgggacacattaaaaacaataagcgttgatttctctggctgtacctacagacctgttactgtgaggcctttaatccatcttcaccgccgctttcttcccttgctttgtcttttaaagtttcaggggactgtcacaaacagggtcttactcagggcctcctgctgctgctctgtggccttgttgagcccgtggggctggttcctgtggctcctcctggccagttgtccaccgcaggtgccatggatccaagaattacctctgctgggcacctccctcccacacaatggcaccctgcttccaggacatgctgagtcctatctcaaggcattcttggtcttccctcaatgttgcagagtaatattattttatctagaacattcctgtgttgaagctcagtaaatgtcagcacaagtaggcaaaagtgtattgctttgggtggtaaactttctccatgctctccccggaccccttcttatccactttaccagccatgtgaatgcatcctatagcttctctgtgctttgttccaaatggcctgcccctgtgaccttcttcagaggctgaccatgggccagtccctccctcccagagagagcctggaatgcctggtagtgtagttctagggaagcctatagccaatgactgtgcaagattctgaaagcctgactccctttcctcaaaatggggcaaattctgacataatttatggtctagagctccccaaagatctggctaaggccagggagttggctaaaattgtgcctttctctgttcttcatttccttttctcttgtgttcttctcctggcccttaataaataccctgttcatgatctgtgtctcagagttggcttctggaggtccagccttaggtatttggttaggagtgcaaggatgatttttggaggcagattctgaggatgggattctagagttaagtcaccagctaagtggcaataaataccccatcacagggggtatgtggagcccagaggggccctgacacactagagcattgcagttgctaaaacttttacctggagcgaattaagatgatgtcatgggttgaattatgtaacctcaaaagatgttgaatttcacccccagtacctgggaatgtgatattactgggaaataagatatttgcagataatccaactagaatgagatcattagggtgggccctaattcaatatcactgttgacctcacaaaaaaagtgaaatttgaacatggagacatacatgcttagaggaaagatggtgtgaagacacagggcatccacaagaacaatttgaggccaacagggaggtcatggaacagattcttccctacggttctcagaaccaaccttgccgacaccttgattttggacttctagtctccagaactgtgagataataaattcctcatgttctatgccacccaatttattgtattttgttatagaagccctaggaaactaatacagaagggattctgacagaacaggtatgctagattgtgcaattttctttggcttttgatggtacaaggtaaatggtcattacaaaggctgtggatgggttccatgataaatagactccagttggtcagcataaggcaaagtgagaaagtcaaaaagtcccttggcagctcttaaacaaaccccctttttctatagccaagggagaccatgctgaagaccaggccaggaccaactataagaacagtggacctttggtggctcaggcctgtaatcccggcactttgggaggccgaggcagatggatcacctgaggtcgggagttcaagaccagcctgagcaacatggagaaaccccatctctactaaaaatacaaaattagccaggcatggtggcatatgcctgtaatcctagttactcaggaggctgaggcaggagaatcacttgaacccaggaggcagaggttgcagagagctgagatcacgccattgcactccagcctgggcaacaagagcaagactccatctcaaaacaaaacaaaacaaaaacaaaacagtggaccttcagggacacccagtttacatcctcagcaatcccatgcaacagccaggaacttggtaaggaagaaatggcttcttaagacttggaatcagaaaatgtgaatagatgtcattgataaatgtgaaactgcagctgtccctgaatcctctgggcctgcagaatgggcccacatcttctttctagagggcagagctctcttgcttgaagattggaagcaagtgtacaaatgtaagcagagaagcctaacaagagattaattttatggcttatatctttattagaacttaaatccaatatgtttattagaccttacagttctgtctgagagaaaagagggatatgttaaagtcctcactccacaagatttgtaaccataggcataaaacctttaaaggatatactttatggcagtgcattccaaatttacacgtaaaacagatttctgctattgcatttcaaattcagacataaaacagatttccaacttctttcacctgttgggctggtcccatgtcatatactcaatgtgcagtactcacttctttgagcctcagtaacatgtgagtagaaatgggatcattgtaataaatctacttgcatcaacatatgttccttgtctcataacagccatttatccccaaccttaattaaatatttctgaggggtaactaaagaatactggattgctgttggtttcagatgaaatctgtgcagagtctgtgccatgaagggctctgcctatattttggttacaaaagttatcttattttggcagggtgcaatggctcatacttataatcccagcactttgggaggcagaggtaggagaactgcttgagcccaagagtttgagaccagcctaggaaacatagagagatcccatttctacaaaaaaaaattaattaaaaaaattttataaatttgtaaagctctttgtgcatatattgcctgatgtcatattctcctcaagcagcccctgagatgaggagtcatgtgggagtaatttattaacaaggtgatctcaaaggaagacagggaaggagaagggaaagaaggatatggaaaagagagaacccaagaaagtgtgtgattttgtcaaagtccagcttcagcctcatccaacttgaggccagggagtcagattgtcagacacttggaccagtcagtcattgcctaagaactgcacagagggttaaagctcccctctcccagctccatgcagagatccttaaagacagtcccagttgcggccgggtctggtggctcatgcctgttatcccagcactttggaaggctgaggcaggcggatcaagaggtcaggagttcgagaccagcctggccaatatagtgaaacctcatctccactaaaaatacaaaaattagccaggtttggtggcaggtgcctgtaatcccagctactcaggaggctgaagcaggaggattgcttgaacccaggaggcagaggttgcagtaagctgagatcatgccactgcattccagcctgggttacagaggaagactcagtctcaaaaaaaaaaaaagtctcagttgcaggccttcggaagcaaagcacaaagcagttggaagaggcttacagaaagagcaaaagaatgtggggtatctgtgtgtgctgtcaacagtgctattactgtgaatgaatatctgtgtccccccaaaattcatatattgaagcctaacccccaagttgatgatatttggagttggggccttggggaggtgattaggtcatgagtgtggagccctcataggtgtgattcctgcccttataagaaaagatgatctctctctccgccatctaaggatacaagaagacagcatctgcaaaccaggaagggggtcttcaccagtcacagtctgctgacaccctgaccctggactatcctaggctccagaactccagaaatcaatctctgttgtttaaatcgctcagtctatgatatcttgttatagcagcccaaactgactaacacaattatacatgtcaaaatcctttctaatctgtggatctgggctttgcaactttgcatgtctcacagccagcagaggattctattattaatggtaatccatgtcaaatttaatactataagaatttttcataaaatcaatttgtttttaaccttttggctatcaaactagttgtaatttgaaatccaagacaattaaatctttgtaaaatgtgggtctttttgtaagatgactttaaccacagagaaaatgtaaaattttaggaagggtaagacatgtagttagcactgagattactatgtgaggcctaatgttatctatgtgtaaggcaatcatcagtgttacatttcattagaaagatggcttttaaaaaacaactagcgccaaggtgggcagatcacctgaggtcaggagttcaagaccggcttgcccaacatggtgaaaccccatctctattaaaaatacaaaaaaattagctgggtgtggtggcagatgcctgtaatcccagctacttgggaggctgaggcaggagactcgcttgaacccagaaggcagaggttgcagtgagccgagattgctcgactgtactccagcctgggtgacaagagtgaaactctgttaaaaaacaaaaaaaagaaaaaagaaaactagccagcttcacaatggaggcagttccataatttgttgggattttggaatggcagtgagctacatatcttttctttcatgttctaacatatagaaaacaaactaagtctttgtatattagctaactcagcagaacagtctgtgggagattatattgatcttgaatacacagtgcacatgtattggatattgatgcataatttgggtctaatttcttctcgtatctaaatactcgtaaacatttagaatggtttaaatgtacaggctcagaatgactttaataggacctttaaaatttatatttatatatttaaataactgctgatggcactgttgtttataatattaggtttcttgctgacctctcagaattttccttagagcctgagacaggccgactggttggttccctatcttaagattgtctgaaggaaaaggataaaagcccctcaactcaaactctagcttgtctaactctcagccaatcagcaataaaagaccaaggaagctattaattgcaaatttctatttcagggggctagaggctttcccagagtcccatatgtggagtcagacttaaactccaacctaaagttatcttttcctcatttcaacactaaagttcatgcccaggggtggagatttaaaattctaatgctacatgcaatgtatgaagaaacatgttgagccattgtgcaggtgctagcaaaactctccctatacattccctgagggaatccttccctatggaaagaccctatacctaaccgaaccacacagtatctttggggaacagcccactcctttttgctctctcatggctggctccctgagaggtaataaactctcttcattgctgcctctggtgatctctcttgatttctatcctgagaaatcacaagatctcagggcactggtaagaagcttgtcacagattctttgaatttcctcaatggttctgaaacaggagtgttcccttgacccctttgcaggacttgtgacatgagtgacttgtttacttgtttaccatgctgaatcccttatggaaggaagcacatgagtggatgggtgtgggaaccagagcaaatgaatgtggaactggcctgtggctcctctccggcgggagcaagctttgtgtgggttctgcagcagtgtcaaagtgtgttacaatagtcttttagctctgcggtctgggaggggctgtctgcgacccccagagccccagagggcatgtgttacaatcagtgctcctttaacatttgctgtctgtggatggctaagtgttaaccagctcagtggaaggtcagggtgacagccttttacactttgctgtcttggtacctgagttctgatccagcgtccaggaagaatcaggtcacatgaacaaattgaaggtggtgaatgtggaggactttattgagtggtaaaagtgggcctcagtgggaaagggagctggaaaggggatggagtgggaagataatcttcccctggagcccgggtgtctccagctgaactcctctctgaccatagttcctgacctccagctgcttcttctcatctcaatatccagacacttctctcttctgtgtgtgtgtccactgagtctggggcttggggttcttatgggcacaggatagggggtggtgtggggtgggccaaaaggcaacaatcaggtgggaaaacagggatagttctcactttgggctgagggtccaagcttgtgggtggagcccttgccaaagatcctgcccttttctaccagtatttgcctgccttctgtccatttcagttcaagacagtttgtgcaatttggaaacagccagatctaaacagtgtaaaatctggatagtcaggcagaataaggctggaaaaaatatataattatatagaataaagctgaaaaaattcgctgagtaatactctgtgtgtgcacctacatgcacatgtaacaaagtgataatttctatttccttagatgtttcaaaatgtatcttgaacatatgacaaatatttaatgttttctgggtgactacattgaagcccaccactcacttgggacagaaaagtcattttttggtgtgtgattatacttgctatcttatggtcacaacttttaatactacatagaagcattaatatttttatttttcctttagatccttcactgaattcaacccagtctactcaacagttcaccaagagtcttgctatctccaatttcaggatatgctttccatcaccaatacccaggttaatggacactcctcaaccctttgtcagtccctgcccagtgttgcctttgagactgaactctggacagcctttccatgttctcttttctgtaaaaaggagactttttatttctggcagcacttgcctaggagatagcaaagttaaatgttgtgtttcatcacaatcagtctcaactaactaaaactaattaaacactagggattttgagtaacccacctaccctcactagaccctttctttatctaactgaagatgttcatgatcaagaagcaagaggctgtctcacagatctcagccttgtatgaaaggtagttctcagtgcttaattagcaccagcagcatggccctacacttcatagcatttaaaaccttcagttttgcccttaagtccacctatgcagttgtcccctaataagctcagctcagctccaggccacccctggctctgtggcccatggtttttgtattattctttgtcatctctaattagcctcttctgcctcaccactacttaattatttatccttctcagaacttctggcgtgtattgtactatattttacttttaaaatatgttgccagtgttctcagtttgtcatttatatgacatgttccatgacaaagtacatccctaatacaaagccttaagcaatctcattaaggacagattgctgatatctaatttcttttcccattcctagaggcagtggtcttcaaagtgtggcctccagacagcaatatcaatatcatctgggaatttgctagaaatgtaaattcccaagtcccagctcaaactcaatgaatcagaaactctgggtgtggggcccagcagtccttcaggtgtttctaaccacatattcaaatttgacaatcatttactcagggtctcacccttggtagtatcttaataaatgcctgttaggttgactctgataagtctttctctcaagccatcttaaaaagcatggaatccaaaaattccaggaagaaatgagaaaaaatgttacaaagaatgaagtagggattttaggtttatgagcaattagagggaaccgagtcttcacaaagaaacacaatatcctgatttcctgtctcatgcttgattttcctacattgtctcacctcagctgcgtgattccatgtatctcactaacccttctgtttgccttctgtaaggttacatgtagattctgagaaaattctttttcaactttctatctcttattcccatttcactctatgtcttcacagaaaattatcactgcaaagctgagcggtttctggagaatcttggctcattcactgaattctttgggaagggctgcttccctttgcacatcttcactaaacttggacctttttgatgactctcattttttatcaccaccatagtccttagatgtccagtggagcagggaaactgatggttttctgcacaggttgctcggggcaaagatggaagttggaagtaaggaaaagcatggagttggaattgtatgctgaatgctgaagcaaaagagtactcaacgtctctatggttttgctttgtgctgggccttcctaaaccttgtgaacacctggtaaatgttcatttgattatgtcaagctctttggagcagtagctttcaaccctgattaggatgtcagaatcctttggaagaattttttaaaaatctatgggcatggaacccatccatcagtatttttaaaaatttcccaggtggtttccatgagtagctaaggttgagaaccgtggttttggatttcccacttgatgattttaaaccataacatcactttgcctatttttctaaatattcctctttctacagtcagctttcaaaagtcagactacaactgaatcaaagaattatacaagaaaggggaaactgagccatccttcagcaactccaggaacaaatcaaggtacatataatgatggggtagtaaatgctaataccgtctatcttcttcccttgtatctatccctgtttttgttcccctctttccactctggcttcctattctccctttgtggcaaaatatccactattcttgaagacagcgaaccagcaaacctgctaatattaaagcttcagtgacccaataggtagctacactttgaggaacattttcatttccaaagaaattatctgaagagaaaaatgtctaattcaatgggctgaaatgcaaattgttatgtttcaggctagaaagatatctaacccaaggaacttccttatcatgctctgggagacagtaggctgcctcatggaaggccgttatagatgtccaactaaacattgcaaaaaatagaagcattggcttgggactgagaaatgatattcatttggtgcaaaagtaattgcgatttttgcccttgaaaatgatggttaaaactgcaatgacttttgcatcaacctatggattagtaattgatacacaaagacatgacacatgagaataccaagtgcactgcttggcacatagtagacattcaacaaatgcttcttgctgacaacttttgctttcctcctcaatcacccactttttagaatccttgaaaaaatcttacaaatttttcaaatattcaggaaacttaaataacatcagatttagagaagaattattgactgtagccaatttttggacctatacattttttaaactatgtgatgggaatctcttcattttttagagcaaaatggatgcatatcaattacaaaccttgctaaatcatcctttctatctctgaggcaataaaattcattatcctggttagtttgaggatatacttaacccataaacaccaacagcaagtatagattcagacatttgtatctataatttagacagtttaaaatgcaatattaagtaattcaaaaattgttcaaagctcagtaccttttcacacattaatactttgattatcaacttccttttaaagagtgagtagaaaaggttagtaagtagaaaagagtaaaagaggcctttctttcacaacttgccaagacgtgcattacttatttaaaataaaaaaaaaatgctgtttgaaaaacaagaaggatggcaagaatgaagctccttcatgcaagatacctctgactaccctctaaagacagttactatggcatggtcatagaattactgcaggaaaaaatttgtccactgaggctgcttcctccagaggtaaggtttaacttatggtaacttgctatggatcaacagctcaagatgaagtgtgtggctggcaatttaagtgtaaaattagatttccagtataatcagtcatctgatagcccatctaaatgtattctgcatttgcacatttaattaattatgtcttaattgaaaacattttgctcataatgattggttctaattttattccaaattaaattagtaggggagaaatttagtttgggaatttattgatttatatatatattaaagaaaaagtaaaaataatggattttctcttttcttcttaaaaggaaatatctttctgctcatttagaggtgcaaaggaaaacatttagaactttccagatgaataaattgcatttcatctgaatgaacatctaactttggagatggagagaacattcttttgtattgttgtagatatgcctagtataatattggtataattaatttttcagctacaatgcagattcctgggtcagtgcaaaagaccttgtttatttagaagtgattatctgagaaagtggctcattagtcttagattcttggaatgcacagtctggtctagagattaaaatagctatttaaattccctttatgaaaattgtgcctgacagggcacttccatgtgcagtgaggtttgtatttgcacatctagagcatccaggaaatcagcaaaggtgggttttgtgtctttagatatgctacagttgataaaccctaagattcagatattaactattggataagctcttgcatttcccataactttagctttgaagccattcattaccttaatactaaggaaagaatgtcagaaaatccaaagagagagaattctcagttatgatttttggacatataattggaaagaagtcagatttggcttttacaattagtgccatataatgtcacacaaagtatttcctgcagtgtgctcaaagaggtcaatttgtgatttatttgcaagtcatagttctgaaattactgacttgtgtgtgtaacaatttagctttaacttgggcacttaatttagcattaaatatagctcctcttcaatattgacccttgccctgaacaagatgtcatttcataaacccagttaaacatggtgcctactgtggtttaaataccaagacagattaaatgtattgtccagtttcacagatcagcaatgcttctcttcctgtatcactagctcatgataataacataagggaccagtctgtgccagtggatgggccagaattaaaagaagataaatattgatgtcctgcctgaaagaaaactgggcacccaaggtgtcagagagttgtctgatatactgtgacatgaatgtcccatatatataaattgcagcctttttaaaataaggtagaattgtttgtggaagattaaaaactctctttctaaattgttgaattaaaatatttagttaaataaatcactgctattttcatcaatgttggagttgtttcttcaagtttgtgtgttttctcaattagaaaaaaagtctaatttgtttaaatagtgagaagtcaacattgaactgttgtctactcaatagccacaattccttatttcttgttcacaatgaataagaaatttgtattgttgcaacaagttcacagacaatggattcctctctcaatctgagaggatgagccatggttgatctaggccatgaatattgtggtagattgtattgtgtgttcctaattctttgttctctggccaggtgcagtgtctcacgcctgtaatcctagcacttcaggaaactgaggcaggcagattgccagagctcaggagttcgataccggcctgggcaacatggcaaaacccctctctactaaaaatacaaaaaattagctgggtatgctggtgtgcacctgtaatcccagctacttgggagcctgaggtgtgagaatcacttgaacccagaaggcgaagaatgcagtgagccaagattgtgccactgcactccagcctggatgacagagcgagactctgtctgagaaaaaaataattaaaacagatgattcttgttccctccccatccttaccttttttttaatgaggaaagaatatttccctgtatcactgactttgggcttggctatgtgactgctctacccaatagaatttggtaggttaatagtaatagaagtaactaagcagaactttaaagaagtttctcctcttcaactcttgcttataaagcattataaaaatcaatatatataaagcattataaaaatcaaatgctctaagtagtctgtgtccttcaacatgggtccaggaatgagagacacctggagcacacctgactctcatctgtagtctaaggtagaactgcggcaaccaattcgcaaaattcatgagcaaggagtaaatgcttgctgttatcggtcagtaacttcttgtcatgtttcttaagcattattggagcaaaagcaaactaatacaaacgttagtgtaattcctttgcttgtgattgatttagagatgaatatttgtcctgtttccaggtaatacaatgtatttaggaagaatgccaaaggagggagcttattagtaggattttgacctctaatgaaaatgatggccaaatatatgaaattttttctttctttggtttttattgtttaaagacataattatttaagttgtgttagttgtgtgtgatcttataactgtgaggaattacatagaatgaaaatggaatgtgctgtggtggcagaacagaaagaagttgggtgattgacattgttgagctctgcaggaaatctgttagtctccatttccggaggtcttgctatgtagaaaaattggatgactttattgcttaagtcactataagaatgttttctgttacctgcaacccaatgcacccaactaataaagtatgtttctagaaatacacttgcctgcactcatttttaagacacacagaccacatacacacggagagatatttttaaaggtcttgtactacataaattgtactattttttaatttaaaaatatgggccaggtgcagtggctcacacctgtaatcctagcactttgggaggccaaggcaggtggatcacaaggtcaggagatcaagaccaccatggccaacatggtgaaaccccatctctactaaaatacaaaaaactagctgggcatggtggtgtgtgcctgtagtcccaggtacttgggaggctgaggcaggggaatcacttgaaccctggaggcagaggttgaagtgagctgagatcgtgccgctgcactccagcctgttgacagagcgagactctgtctcaaaaaataaaaattaaaaaaaagataatgtgatttttttatattatagcacatgtacaagactgaaatctgtctcattttttaaagtaactgcctagtactttatgcatgaacatcctttgccttcaaattgaatttgaggatcaacctcagctattttcataaaataaatttaaaaatatataaaaagatgaaaaatatgagggaaacattaagtgaaatggaatttgaattcataagttgtgatatccatctaaatgagtcaccaagagttaaaagatgaaaaatgaaaacaaatactcacggaaataatagaagaaaactttaaaaggtagagaataaacacatgctgtaatgtcactacccactcagtgttaagttaaatggatttgttgagaagactccaaaagcagttataaatgtcgagtatgtgtgtgcacatgtgtgtgtatatgtgtgcaaccctatataaaatattttaaaatcacttttattgaaatattgcatatgtacatctaagaacgaattttaagcttgatgaatttttacattgttgacacagccatttaactatcagctaagagaggaaataaaacataaccagcaactctcacctcattttatattcactatcaatccttactctttttttaatttgagacagagtctcattctgttgctcaggctggagtgcagttgcatgatctcagctcactgcaacctctacaccctgggttcaagcaattctcatgcctcagcctcccaagtagctaggttacaggcactcaccaccatgcccagctaatttttgtaattttagtagagacagggttttgccatgttggccaggctggccttgaactcctggcctcaagcagtttgcccacctcagcctcctaaagtgctgggattacaggaatgagttactgtgcctggcccattcctcttttttaataccccaaaggcaactgatatcctaatttctcacacaagggattggttttgcctgggtgttgaactttatataaagggactatcagtacattatttgccatattgatctacgttattttatgtaacaataatgcatatttattcattgttccatagtattccatgtagaaatagatcacaatttatttgctatttcttctcttaatagatatatttgggttggcttctgttattgttatgaatacgatgctttaaatattctttttctagtaaaaatatgtgcagatttatagctgaacagaaaaagctttgtcttttaacctggatatctggattttttactcttggtgaaaataactgcaatgacatttatcatgtatgatttaaagtcaggaaatgcctcctggtaacctacagggtcagtttttcactgatgggttacaactggcctaattggtttgacaaacctagcttgattacatggacaaggagacataaaaggcttgtggagaatttctcctcgaagccctcctgaaagcatgattcctagcacagaatcttggtggttgacactggagacagaatgcacactctgtgtctgtgaatacttggagccctgggtagctttcaatatgggatgtctttcagactcccagtccatgcccgcactctctttcacttgctgcaccatatcctttgcctttaaataaaagccccatgtaaatatgttctatggaatgtggtggttcctttcaaacatccaaacaggaagcttttcagtatgtatacatttctattgataatacacctaagaatgaatttgctatttgccagttcataaaagtatatatatttatatattgagctttagacaaaattttcaagtaaaatacaaaaagaaatttcttgaaccattagagaataagttactgacctgatttccagttaccaccaaatattttggggtttattccttacaaacaggtttctcctacatgttcacaacacaactgtcagcattggttgtattcccactaataccctgttactgtctaatcctcagaccccattcaagaccctggcactctacattaagctacccctgtgtgtagttaccttcttcactctactctgactccaacacctcatgcttggccaccgtcattcttggatgccatccctgggctctgatctactccctagattatcatccatttcacatagacactcttctcatccttcctgggttaaacccacatgggtgctcaccccactctgctcagtgaggctctgacactccaaccttgctgtatcactgcggtgatgcccttttcatcttgcttgggttctgccaccacttctgtgtggactccttctcctgttctttggctttgatacctggcaccttggagccctcctatacagatgcccctttcagtctatttacaccagaaaatcccacagtgacttgactcttctacatgcaaatcctttttatcccattctgtgccactgccttacatgggtgttctcttcccactagcctgaggggtttagacaccaggtgatggataatacttctgtctcgatgctccctcaccttgttttgattctgacaccccacgtgggtcacctacatgcattgaagcccttactcagttgtggcttcaatccaaatgaggcagccttcctctgtagatggaggaattaaccatttttccctattctaaaaattagtcatttccccaaagagcacgggtttctttcatggagaaatagtgtttggatacaaaggtctagaggctaggtgttctactagggtgtcatttcttctagattctttcacttcacaaagctaagaaatacatatgcatataccaagcaaaacacaccataagggtaaaatgatgacttttttgaggttggaggtcactatctctccatcctgtcttccttagagtatttccttgaaatcttaataggtccaaataacaggtttatgcttttgattttgcagtggaagaatggggactttctgacccttggaattgtaaacaaatgcctccaaaacttacttgggagtttttcacaagaggactatcttaggatgtagccctttgtctcttgaggagatgagaagttattcttacttctgctttgctaaataaattatgtgaaagtctgcctagacattttagtcacttttgtagtacctacgtgcatagaaatctgaccatgttcatgtagtaataaactgtgttctcttttctatgttggttcagagaggtctttgttagtgttattttatttccaacaaacacacggcctatatttctgtattgttactttctagagatggatgactttggatggtcaaatattgatagaaaggcactagtgaaacataattcagaaaaaacacatttacagatttggtgacaagaaatgaagaaatttttcatgttaagctccaattatctctgaaaggtagaaggaaagtcattagttgagagtatacatggcattggagttggaagttttgagaaaagtggaggcttacaaaattaaaatagttgtttccaataagatgaaatagaactgattaaagaacaaaggagacatgattgctgaggagtctctcagattagttcacgttgatcactgtagtctattgtttcacaataactcattccaaatcaagctgcatattggattcacctgggatcttttaagatataccgatttctgggtgccacctgcagagattctgttgtaatcactcaggagtctgacatcagcatccagatttcaaaagttccccgagtgattctaaagcatcctgaagatcaagaaccattgacccagatagaatgttcattgcctttattgttttccacaaaaacctacccatgtaaagcatttgtgaggatataaaagtttactgaaaattagaaattgagagttgaattggcaaacaaatttagtcaaattaaattctgagttttaatgctttcctatggccaacccaagagtgtggaactttccttgggccttcaccccattgtctccaaactcaaatcatttcactaactcttctccaccttcccagtctctgctttctgaatgccacttcctagtctacctgactctgggaactatcggttggagcaaaagtaattgcactttttgccattaaaattgatgtcgaaaaccacaaattacttttgcaccagcctaataaaacttgttactccataactcagagtgattcagctctcactaacaacctggtgttctccattttcctttagcctggactatagctattcatcacttttgagaatttttaagaggcaacattcttgcatgtgatctggtttatagaaccaggataaaaggtcagtgttgactccaaagtttcccaggcccgggatctcctcagaaatatgtggcagagacagacctgcaggataaagacaagatatgcagtcttttctcattcactccattgatagctagtaacagccgaccatatctcagttgaatgaagttaaaaagatagatagacaaatagatacagtagagtgtagtccatataatggtttagtatacataggaagtacacaaatacagtaacatctggacaaactagaggatgggagaagaagggaattgagagagtattgcaagaagtgaagaacccagggtttgagctagcctcctgaatccacatgtatagagttgtagaattggagtactacaaaggatgtcagaaatcatctaatctagtcaccctttgttacagactagaaagtagaaatctcatagcctaggagttgaactgaattgaagaaagtcccataacaagtcaggggcagcgccaggattaaattggaatcggggttcattgatgactggcccagcgatactccctcaacaggtaacgaatttctaaggttctatgagcacagctacaggagggattaggccagcaatagggtcgctggtggcagtagaggcctaaacctgcatggcttacacctctgtctgcaaagtgactgactcattccaggcctatctgtgcactctgcagtacctctgctcagaaggtgccaatgggggaaatgctagatagataatttggcttgagcatagagtgtgagggaaggacacatactgaaaataggaaggagaatgagaaacctgaatcaagaaccagcctaacaaatattaggcctttgaattataaagcaggcatattgtatggctttagaaaattacaagatcataaagatgagcaaataagactagaaaattatgactttgggaccttgtgtctgaagtaaatggagaggcactttggggagtggcaggcaatgaaaacacatctaccacctgagatgactcacagaaattcaaaacagcctcttttttttaagtccaattcaaatatagtcaagtgagggagggtacatcatttattctcaactcactgtgtttagtttcttaaaagatggccgaattgtaaaaaaagtttttgaatggggcagttctagtgtcagttgttctctcttttccttttttacttacccactactataaactaccatagatacattctttacattcagttagttagttttacgtttcccaatttccacatttgtaattatagcctaggaagcttctttgcttggagaaagatgttcttatattaaaacataaaactcttcccaagcatccactagttcatccagtaagcaatttcatcattacataccagaggtcagtattgcactattaatttacatgagtgattaatttttactttcccagtaataaagatgagaaacaaaataccaaagattattactatattagagctttggtgttagttccttaagcaagtatcatctgtgcaggcatgcacagatcatgaatggcttaacaaaaatacgaaagaaaaagaaaaaagccatcacaatgaaggtggcctttgttctttaggaagacattcataactcattccaggcatattaattatgcaacttttacacaaaagttactttatattgagaaatgttcacaactagcagtattaacagacatgctggcagtgaattaaaaagataacaatagtttttaaagcctcattcaaatctgcatatctacaatagtgtatcaatttgggatggccaaagttatagataatttggataaataaaataggggctcagcagtaaaataatgactgtatctccagaagctttaagattaatgaaaagaagaaaagactaaaggcagatcaagctgtcatgctgactacagacatagtaaaggctttccacagaaagagaaaatagattagtcttgttttactctggtcaacaaagggtagaattatagaaatggagattgcagctgcatatagatagaattgttaagactcatagctattccaacatctttgcttagggggccatagggagtgccaacatcgagtatcagaacaaactagatgaatgccaaaatctcttatactctaaggttatatgagaaagtgattttgatgccaaagagtaaatattccacaaattccaaacctccttccaggcatatatattcgagtagcaccttctttaagaagtctcccttaatctgagaacacagtttgcttgtgtttctaatactttgaccatacattgtcttttgtcatcttttgaccatattgtacatttatgtattatttagctttgtgttgttatgtcttatctaaaaccaagattcttcttttaggaatacatgttattttatcctctatgacacctagcacaatacaatgaagttagtagatactcagataatatctgtagtctgaacctatttccttatctaaacagtaaggaataagaacacccactttacctgcctcactgagctgttttgaagatcagatgaaataatgtgcctgaaagcactttgaaaagtatagaatgttatacaaatgtaaggcattctaatttcagagggaggtttttctcagttacaacctccatgtcagctcgaataaaggaacattttttaaaacttaatctgaaaagaaacttgtcccttctaggcacaaattataaaactccccaaaaaatgtttgtatatatttttgtttgtttgttcctaaatagtataatgagctatggtctttcagggaaaatgttgctctgatactagttcacaatgtagaaaattgcccttatgtactttcaggaaagaattgcaaacaaatgagctattttcttttctcaagtaaagtgacttcccaagcatgggtggcagctgttcaagtccatctggtcaagaattcactaagatcataatgtgaaagttgctcaagtgcagatttgcacgacagcctgcaaatgttcctttggagacgaaatggtttctcaggtcaatgatctgcatatttaaaagtctctaggacaccctaagatggcggcgagggagacggtgaaggttggctcccgcctgtctgggctctgatcctctgtctccccctccccctgcggccggctcatggcctggcggaggcccgaaccaaagacctccgcaccgccgtgtacaacgccgcccgtgacggcaagggggcagctgctccagaagctgctcagcagccggagccgggaggaactggacgagctgactggctaggtggccggcggggggacgccgctgctcatcgccgcctgctacggccacctggacgtggtggagtacctggtggacccgtgcggcgcgagcgtggaggccggtggctcggtgcacttcgatggcgagaccatggagggtgcgccgccgctgtgggcgcggaccacctggacgtggtgcggagcctgctgcgccgcggggcctcggtgaactgcaccacgcgcaccaactccacgcccctccgcgccgcctgcttcgagggcctcctggaggtggtgcgctacctggtcggcgagcaccaggccaacctggaggtggccaaccggcacggccacatgtgcctcatgatctcgtgctacaagggccaccgtgagatcgcccgctacctgctggagcagggcgcccaggtgaactggcgcagcgccaagggcaacacggccctgcacaactgtgccgagaccagcagcctggagatcctgcagctgctgctggggtgcaaggccagcatggaacgtgatagctacggcatgaccccgttgctcccggccagcgtgacgggccacaccaacatcgtggagtacctcatccaggagcagcccggccaggagcagctcataggggtagaggctcagcttaggctgccccaagaaggctcctccaccagccaggggtgtgcgcagcctcagggggctccgtgctgcatcttctcccctgaggtactgaacggggaatcttaccaaagctgctgtcccaccagccgggaagctgccatggaagccttggaattgctgggatctacctatgtggataagaaacgagatctgcttggggcccttaaacactggaggcgggccatggagctgcgtcaccaggggggtgagtacctgcccaaactggagcccccacagctggtcctggcctatgactattccagggaggtcaacaccaccgaggagctggaggcgctgatcaccgacgccgatgagatgcgtatgcaggccttgttgatccgggagcgcatcctcagtccctcgcaccccgacacttcctattgtatccgttacaggggcgcagtgtacgccgactcggggaatatcgagtgctacatccgcttgtggaagtacgccctggacatgcaacagagcaacctggagcctctgagccccatgagcgccagcagcttcctctccttcgccgaactcttctcctacgtgctgcaggacccggctgccaaaggcagcctgggcacccagatcggctttgcagacctcatgggggtcctcaccaaaggggtccgggaagtggaatgggccctgcagctgctcagggagcctagagactcggcccagttcaacaaggcgctggccatcatcctccacctgctctacctgctggagaaagtggagtgcacccccagccaggagcacctgaagcaccagaccatctatcgcctgctcaagtgcgcacccaggggcaagaacggcttcacgcctctgcacatggctgtggacaaggacaccacaaacgtgggccgctaccccgtgggcagattcccctcgttgcacgtggtcaaagtgctgttcgactgcggggccgaccgggacagcagggattttgacaacaacaccccgctacacatagcagcccagaacaactgcccggccatcgtgaatgccctgactgaagcaggggcccacatggacgccaccaacgccttcaagaagacggcctacgagctgctggaagagaagctgctggccaggggtaccatgcagcccttcaactacgtgacgctgcagtgccttgcagcccaggccctggataagaacaagatcccttacaagggcttcatcccggaagatctggaggcattcatcgaactgcactgacctgcccagaacatctgcaccctcacctctcccctctcctgctgagacgggggaaatcaggctggggtatagcagatgctcgttcttgcctccttcaggcaccaatcaggagaagggttctgcctcccatcccctttacctgaagacagggtctgaggtgttagcgagcctttggtgctagaagccttcagggtcacatgccaagaggacagtctttctccgggaagcccactgactcagaaattctgagttaggaaaagacacaagaccttccccacatcctgtctgcctgggttacggaggcctttgccttgttacctagaggcggagggactgaagccattgcgttccttccttgctagaaacacaggaagaagttgaggacggtctgccttcccttgtccttttacatggccaggtaactccagctgctgaatacagtgttaggactgggggctcccgagatgagagtttgaaagtcagggaatgaaaccacctctcatttcttccagcatgatcacgacctgctcctgtgccaccatagtccctggcagacaggcagggctctgctcagggcagcctgccacttgcatagcttttggttagtttggtgttctgtttatttaataagtgggcaggttgcaagcattgcacaggaattctgagattttactgccttttttttttttttaaagaaagttgtttgttggactccgtaagtgaatttcaagcagtgaggattctgtagtgcctgagatggctgaggccacagggagtgagctgtatgtgtgaggaagttggtgagcgagataaaagtccatggtttcgacccctaaaacatgtgtgactgtacatttttatacatctccactctacggccttttacaggctttccaattttacaggcctttccaattttccattatcattagaaagagaactgtgcttccaaacagaaatcaggagtgaccacaaagcctgacaacactttgccacccagcaagaactggcacaattggtttgggtctgcattgccatagtgtccgagttaaaactacaggccactccaccttgcaaacctcacgtggcctctgatttcattgtgggtgcatccacaggtggcgctagctcttttttcagctgctccgaggattgggacctaagtcatcatgaaaaaggcccaggtacagtcttaatgtgataaatccactagctaagacgttgagtgccaagactagccttccagccaaggtttggacaaagtctcaagttcccatgactcagggtaaggtgctggggctgccagaggacctgccccagcaagatttttctcaagagtgagactccatcagcccgggcagacgtgagcaggttcttggctggtgtagacagcagcaaacagcagaagggaagccattctcactacatcctccctgcagtagccacagccaggcccttaggaggagcagcaaccgggggtgtccagaaacatcccgtccctggatggaaactaggtctcgtttggatttttttttcttttttttgccatgttatgaaattatttattaatttacaagacaggttttatctcagccaaggagggaaatggcgtccctgtccctcccaaagcacagagcagagaaatgaggctgtttacatcgcgagtctccgtgctggtgtttaagtcattaaaaagatattcaaaaaaaaagtctctaaatacaggtttatggaataattcataacagctttaaggaactatcatggtatactgggaaagtcactcatattgcaggatagatttcttctgttggctggtgagcatttgtttatagttggccttgaatctaccacaattttagaagtagttcttttatttctttaaaagcaacattttgggacaaaatattgtgaacaaataaggaatacgactatatttgtgaaaccccttgttaatttccaagtgatattttaaatcttgaataagacatgtatgctcataaataaagaggaaaaagaaataattaaatcaatgttcataagagcttctcagaaaataagaaagagataagtgatagaactataatctacaatctaccctaacagtatatttgcatcacttcttaaactttgtttagtattttaacacgctgtttcttattatatgggaagaatgctgtgaggtagcatgttaatgttttgcagattaataaactgatgttaaaagagattaagtgactgattttgtactttcattatctcaaaagtgcaactaaaactgcacttaggattgccactcctgtcgggggccatggctttggtcctattttctgcaagtctctggatgacgtctgtccacccactgtctctgagtgctctcctcacctcggccttcctcccttattttagtccaacacctgtcaccactcttcagaatcctcatgaaacttcaggaagatcgactgggtagggcttgtttcagaattatcatccagcattctagggctgatttagaattcagagaaagaagcaaaagcacttatcaaagtgtctgttctagaggtaagctcagaggcaccatggcaattcccacatttccccagcatgtcttcagaaatacctgatactgtcatctcaggcccagatatcatccaccagctgaaggccgtgggcaacattcacatctcagagtaaagagtgttttagaagtccatgggcaatcaccagtcatgcaaggagttccaggggccagccagttgttcctttcatgagttaggaggcagtaaggacatcacggtgatcatttccactgaaaacacaaatttaagtccactctgctactcagcagttaatgctgacttctgaaaattatgaagcatttatcactatggtctccttctaggtttatcagtgcagtcagctcagaaaactttcattcctttggtatatccagctccagctaatcaggtagggaacaatgaaaacaggctgacatttgattcagaggttctggaaagaaagtggacctggcaacaaagtgactgcacttacaaccccccaacctaatgtcatcaggatccagggtagaccacctggggctactggggagagaagacagtttcagaggctgtctattataagcagctctgattaacatcttaggaccacaagacaaattatcattggtatttgaaggcaaaagttcatggatgatctgggcctgggtgagtacctgggtctaactcacaagtctcagaaaggccctctgggtccattcccgatatattaacaaaatgcctgaaacacagtggggtttgagcaaatgatagaatgaatgtttatggaaggacggttgtctgacctcttctactatacacttttgagaaaggttctcagaatgtatggttaaagtattgtataggttgagcattcctaatccaaaaatctgaaattcacattttttgaatgctgacacaatgttcaaaggtcatactcaaaaggaaatgctcattaaagctttgtagatttctgatttttgaatttggggtgtcaaccagtaagtttaatgcaaatgttgaaaaattttttaaaaatccaaaacgcatcttgtcccgagaattttggataaggaatactcaaactgcatttcaattgtttgtttgtttgctctgtcttcaaaaatgagccaggtgcagtggctcatgcctgtactcccagcactttgggaggctgaggtgggcggatcactcgaggagttggagacccgcctggccaatatggcaaaaccctgtctctactaaaagttaaaaaaaacacttagtctggcatggtggcaggctaattttgtaatcccagctactcaggaggctgaggcaggagaatcgcttgagcccaggagacagaggttgccgtgagccaagattatgtcactacactccagcctgggtgagagagtgaaactctgtctcaaaaaaaaaaaaaaagaatgagtttcttcaagagagaaattgtaccttgttcatgtccatcactcccatgcataatatggttccataagaactcagtccttatgaaactccactcagtaaggactcagttttttcagaatgagcagaccaagtaagagcaattacttattgtcatgtagctcagatgagaaagggctgggatttgagaaaatgctctattactgaataggatctggatggctggattccatcacagatgtaaagcaagactacagtagtgtgtccaacaagatcgagtgatagcaggttgtagtgcaggtaagtagatatccacgaagggttgcaaatgaagttttgacctgtccaaacagatggatgcagtacaagacaatttatccttacaagaaagatagcaaattggaattaggaatatttgtcatttcagagggtccaagacaatggtccaggatccaggactggggaatcccttcctgaggacgatgacaggtaaaaaaaaggatcaagctgaagctcaaaaatcagacttgggtgccgggagaggagactaaggaacagactgagatccacttaccagagccagggtattgtctctgcataagctcagagacaaagaaaaatgatgaaaccacagctggcagacacgtagtcatgtaaatctccttagcatcattgcaggattcgtgctgaaagtcgaggcaatggtgaagctgcaggagggctgtaggtggtcatagctcaggaaggaagggtctttcagagactagaaactaggtctgagctaaaacatttgcaatcttggatttctttggggatgttcattctactaacaaaccaacaccaatttaatttcctgatgtttattttgggaggtttacaagaattaatttccttggaactgatttttttaaacatccattatagaaaattctttttctcacttgtgaacacctctgaaaaagaagtattatttataaaagttggtacctgttgaactattagagttgtggggaaaagcctttacagggttcacaagaaaaagccttctccaactatgacttacagatgtactcttaaaataatgacttgacatatttatatgtatatcattagtttaatatcttacctaattgtccaacaaactaattcaatgttgtttgcaatgcattaaatgaacaaaagataaacttggtaatagagaatccagaaagcctagtggcccatgaaatcactggatttgcaaagttattttctcttcagcgctgtgcactatctcagaacaaaatctgttggcaaagcactttattggcaaccaatgcgttagaatatagagacattaggaacgccacatggggtccaaccaatgctccatccaggccagcctagtgcaaaagcaacatgagtggattttggagagcgaggttgcctgatgtggtatcagtttgtagtgttggaattatttaaaatatcttcccaaaatcattttgtgaactaacatggaactctatcatttcagacaaatcccttgattttttcccacagctctccctctttgtgttagagttccatacatgtaatgcccaatatgtgaagagaaaattaacattcccctttttctacttgcagacttccaaacatttactgaaaccttaaactcttactgattctttaaactgtccccattccagttttctctacagcaagtagctctcaatgtgtagtcctcagatgggcagcatccactggaaaactgctaggaatgcacattctcaggcctcacccaagatctgctgaatcagaagctctggggtggaacccaacaacctgcattttaacaagccttccagatgactctgaagcatgctccatactgacaactaatgcaatgcattatggtaaatttgcccacccaccctctggcaaaaataacatctaattgcatttcctttttagtttgatgagtacttatctcggtatcttttaattcacctgatgtttctgttggtaacaaaaccaacaaaaacgttgtaaatttggtacactgaaatgcaaaataagagtgaaggagaggacactggtagtgaaatcaacaactataaagcagtttggggaaattcagtttagggacaggcattatatctcaaaaatccagtgagcatcacattataaaagcacggctccaaaggtgacgatttcatgtgaggacccttcagtcacaaacagaggattagctcacgttcattatttccaaatttccctcaccaaagcacacattattaaggcatttttgagacatttttatcaaaatgaaaatgtgtttgacaatggagcaaactgagatatatgaaatatttacttgtttgaatatctgaagatactagaaatgtgtccttaatttactctgtcttatatgaaatgtaaaccaatgctatccattagcttctaaacatgttccaactgatgcatgttgcaactgttccagccctgttgcataggacaagactcagttttttcagaatgagcagacgaagtaagaccaattacttattgtcattgaagtttgtggtttttgttcaaattttataagggtacaatataatgtgtttaatcatcatggtggccactttttatacatagctttttaaaaacttaaatgcaaacttcacaacctttgcctcatactgaatgaggcctcataacaagccctccagatgagtcagtaccagtagaagtctgatttcacattccatgagtgtttgctgaaggagaatacatgtgcctgtgttctgctgggcatttctgaaggatattgacaagcacagcatataaatcctaggctagctgtgtcacagattggcacaatggcagaaagaatatctctgtgaatttacatcccggcagaggcaaatcaatcagtcaactatggagttgattgatttccattgttaaattcaattggaaaaaaaagttgaaattttctcatattctttgtcatctaatatctgtgtttttctctgttcagttactcttctctggatttcaaatagaatttctaataataaacgtgtaccaattctatcatcaagctgtttatgttctttacatttctgttcttgataattatatgctagtctttgaatatgaagataatgcttctgacccaatattcataatgcatgtgcctcgagttgttattttttgcaagagaaataagtttattttgatctgatacattttctttcccagtcttcatgtgaccagcagcaccaactgcaagactgtctgtcacctgagtgtgacttgcaaccaagcacatgtgggaattcagtgaaggcccctgccttgacctcattatcaacaggaaccagccaaagacagtggtcactctttatccatgtaaatagacaccgtaatttattttcaaaaaaatccaaaggaaaaaatttaaggccattataataccagaaatctgcactgtgagtacttggaagatgacagttgataaagctgggaggtttacaatgactagattgtcagaaggggttaaatgtatgttctaataataagagaacaagaaaaaagaatgccctggtgaagtgtaaatttaaaatacagtggtacattttaggaaaaccaaaaatcaatccatgaactttgaaatgaagggagatagttctgagagaactagaggaactggacttgagatccaagattacaatttactcaattttttatagatactttaagtatggaaaatttaattttattcttatagatagtaaggtataatacagaatataaagtccattaaattaaggtgattatagatcctggttttcttgacactcctatatcatgctgatggttcctgtgtgaatattaacattacccccttcaattcacaagtgtcttgcactgtgtgtgtgtgtgtgcgcgcacacgtgcgtgtgtagcttttggttttattcttgtttgtttgttttgcaaaaatgaaataatagcaaacatgtgatcctgaaactttcttcactgaatacgtatcttagaatctttatttttcttattattcaaaataattcattttttaacctactacttactcatcattgaatatagttatttaatcctcttttaaaaccatttgaattgttttaaattttgtcctactgcaaataatttcatcatattcttttaacctataactgcacatatgttttagtatttctgtaggttaaatttttggaaatggtatcagatcaaaaaagttaacattaaagtcataatcaatattcccaaatgtagacacatttttgaatcttcaatttaatcactttcataaaatttcaactttccttaataatacttccaatttaaactaaggagctttaattgtttaggaccacaaagatttctatcagagggaggacaaaacgtgaaatattttgttttgtaacttatttgttgcaaaaaaacatcactgctgtttggaaattgagaaactgtccaaacaagtacactatggacaacaaatgtcgtgaactgcctgtccacactgaggtttgagagccacaggagacttgagacttcttctaagacagtttaaagaagtctcatttatttgtctttttatacaatgtagcaaatcaatatattaaataatataagaacaccaagctttcttacatataaaactagagtaacctatcaaacaaagctgttccacgtaactgagaactcattaaccctgaggtactaggaatatatgaagtcagtgcaatagcaggcgatagcctgtcacgtgcaactagggctgctggtggggaaaagtacaacatcccagattcgtcagtgatgtggctggattgttgggtgtgagaaatgcaccagccctgactcagagatgccctctcttgctcatcttcctgtcattctggtgctgaacacctgtgcccacccatagtgacctgtgaccgagggcatgggcaccaacaccttccctatctccctgtcttttttctttccctcttttccctttattcattccactatccttcttcctccccctcacaaccccaactcttttcatatcatcaacaaatggcaagtacaggccctgaggaagacacagatgactaagatggagcttctgcccttgaaaagcccctgatctagtctgggagactgacatataatcagaggatcagatagcctgatgaataccatgatcatgtgcctgacaccttagagtaaagaaaatgtggcatctcatgttgctaggaggaatcaggacagctttgcagagcaccaggtgtttgtgatgcatctgcaagttcattgtctttgagtgtaggaaaccaccattggagcatataggctggacctaggaaccctgggctctgcaccaaacacaggctcctgaatggaagataggtgacattgtcactgtcctcagtccctgccctggcttgcctagaatgcaataaattaagttgttataggtggtgtgtacttgtacctaaagatgtcactgctagctgagaggaaataagcccctgaagattgttagggcagtgaaattattctttaagatactgttatgggaaatatatgacataatgcatttagcaaagcccatagaaccgtacaacacagggactaaatcctaatataaactgtggatgttagttaatcataatgcatgaatattggttcatcagttgtaacaaatgtgccacaccaacacaaaatgttaacaataggaaaaaccagaggctggtgggggaagagagtatacaggaaccccatatattttgctcacattttctgaaaacctaaaactggtctaaaaatcaaagtctattaatttttttaaacaccttgaaacagtatgtctatcttctattagttccctgcctttgtgaaaataagagcagacttttggtttttcttctttaggacaagaattatatttttataataactcctccatttcttttgatatatctaattatttctttaataactggatcaaacactttaatattaatgaaggtagagccaataggatatcctggtagattggaagagacagtgagagaaacagaggcataaaggatgatgctgaagtttttggcttgagcaagaagaagcagggctggtactagggtgagccaagtgagatgctgagggcatacaatttaaggaggcccttgcatagccatgcaaaagcaaggtcagcacttccttgatgctctgaatgccttaaagtttgtgcctaagtggttggcttacttcactcttgtcctagtcctgactggatcaatgatatcaccatccactgagttggggcaggctgagcagaagcaaatttggggaggctggattgaatatagaagcttggttccggacatgttgactttgagatggccattgaacattcaagtggagacatcaggtagtcagctggatctctgagtctatatctcaggaaagaggctgagactaaagttatgtatttagaagttatcacaagactagatgaactcatgaagaaagtgagtgtgaatggatagttagatggataagggaagagtttcaaggcctgagccatgaaatacttctatttgtcagaaagaaaaagaggagccagcaaggaaccttgaaaaagagcaggcaataagagaaggaacactggcagtgtacattcctggaagacaagacaatgcttcaaggagtagagagtaataagttgtgtttcatgctgctagagttgagttagacaaagcttgaaactagaactttggtgttagtagcattgaggtcatcgacgatgttgactaaaacagttttggtggagagatgacaacagaagcctgaacagagtgcactgaagagagaagaagagaggagagaaatttgattctgcatatacataaaactctttcaaggtcttttagaaagaggaaggaagatagaaagagagagacagacagacagagtgagagagatgagagagaagccagagggggaagagaggtccagaatttaatactttcccagtttttccaacttgcatctcaaccccttatctctgggttttagcagtggatactttgagattctaatatttatctcctcagaacgtgagatgcagaagaggagataggaaattgagataataactactttcttctgatgggtgggaaaaattctatatgagagtttttctaccaagacacatgtgaaaggaagtggcaacatgtggcaattcatctaagatcaacaactttttttctctgtttgaatttgttgatttggaagttatttgtctggctctgcaacagaatcattatttgctctaccaatttttctaaagtctcacatgctgatgccagttaaaaaagaatacattttagtctgtcaacttttgcttacaaaagaggatctaaaagtgtgttccaaggtaatttgaacagactctttcaagatagtgcatattttagtagatccacagaacagtaaatataacttgataatcacccccaacatttcttgcattggaaaattgaattggcaggtttgcataataaagggctaaaattatgaaccacacaagatttgcctgaaacttgattgttcaggctcaaaattctctactgaatactcttgtgcttgcttttgtatttatccattttcatgaaactgcttagggcagacatttcttttttaaatcttttttcataaaaataaattgtaataaatatgccggcggatggtagagatgccgaccctaccgaggagcagatggcagaaacagagagaaacgacgaggagcagttcgaatgccaggaacggctcaagtgccaggtgcaggtgggggcccccgaggaggaggaggaggacgcgggcctggtggccaaggccgaggccgtggctgcaggctggatgctcgatttcctccgcttctctctttgccgagctttccgcgacggccgctcggaggacttctgcaggatccgcaacagggcagaggctattattcatggactatccagtctaacagcttaccagttgagaacgatatacatatgtcagtttttgacaagaattgcagcaggaaaaacccttgatgcacagtttgaaaatgatgaatgaattacacccttggaatcagccctgatgatttggggttcaactgaaaaggaacatgacaaacttcaagaagaaatacagaatttaattaaaattcaggctatagctgtttgtatggaaaatggcaactttaaagaagcagaagtctttgaaagaatatttggtgatccaaattcttatatgcctctcaaaagcaaattgcttatgataatctctcagaaagatacatttcattccttttttcaacacttcagctacaatcacatgatggagaaaattaagagttatgtgaattatgtgctaagtgaaaaatcatcaacctttctaatgaaggcagcagcaaaagtagtagaaagtaaaagaacaagaacaataacttctcaagataaagctaatgaaaattatgttgaaacggaaactgaagctaatttggatacaagaaaaaggtctcacaagaatcttttcttatctaagttacaacatgggacccagcaacaagaccttaataagaaagaaagaagagtaggaactcttcaaagtacaaaaaagaaaaaagaaagcagaagagccactgaaagctgaatacctgtttcaaagagtcaaccggtaactcctgaaaaacatcgagctagaaaaagacaggcatggcttcaggaagaagacaagaatttgagatctggcatgaggaaatatggagagggaattataaattcaacaaccggacaagtgtcatgttaaaagacagatggaggaccatgaagaaactaaaactgatttgctcagacagcgaagactgattgtgtttgtaaaagcttgatgaaaggacagttaagtattttgatcactgcattttgtttgaaacttgtgtcattgatgtattttaaaacttttgtttaagcattacagtatttttctgtgaccatcaattaatatgagggtttgtgctataagagttagagcatatgctatcattgtattctttaagaactttattttgataaaatgtaaatttgttgaaccctgccacatttagtatccccacccccaaaacctgttccaatgaaaaaattaaaacctgttacgaaaaaaaaattcagttaacctattttgtgtctgtaggctgacctcaacactgtaacataacccattaaaatgaattttttttttaagacagagtttctctctgtcacccaagctggaatgcaatggcacaatttcagctcactgcaacctctgcctcccgggttcaagcaattctcctgcctcagcctcctgagtagctgggattataggcacacaccaccatgtccagctaatttttgtatttttagtagaggcggggtttcaccatgctggtcaggatggtctcgaactcctgacttcatgatccacccacctcggcctcccaaagtgctgagattacagaagtgagccactgtgtcctgcctaaaatgaattttctagacgactgaataacagtagtcctttgataggagataatgacttggtttatggccttaatacactacttaattacttaagatgtttattaatagaatgataaatgtacagagtaacctacaagcatgacatacttttgctttcagtagtttcatgtaaagaaaaaaacttgaaaatagtaatacctgaggacccatgggaataacagacactggggaggtagggtggggagcgggaacaagagctgaaaaactacctactggggactcttctcactacctgggtgacaggatcatccataccctaaacctcaacatcacacagtacacccagctaacaaacctgcccatgtgttccctgaatctaaaaaaaaattgaaataattgttttaaaaaagaaaaagacaatagtattacccatgggacaaaatttgtactattagcaagaatcatttgtgtctcatttagaaacaatttgacttttgttccagtgtttaaactttgacaaaaatggttttgaatagatctttataacctgatgccataaatacaagattctctgataccttcatttaatatatcaatattgggcctaaaagagtattctataaagcttaaattggtattaactatgatcatcttgatgtctatgatagataataaacaaggtcatacataccttactaaataattttggtttttcaccaacattttatctaaaagatttagactaacagaattatttagcatttcgagtcatgtgctttatttagcaagtgagtaaaaatattggaatattgaagtatttgcataaaaaatcaaatggcagtgttttgtgatctctattgtattttctattaaggtttcatatattactttcccattgtttctgaatttgttatcctatatataaacagaaacatggatgagtaccataaaaaataaataaataaatatgccaaactcactccaatagcatccatcatatcatatgtattatataaatacatattttaccattataattgacaaaccagcaattatgagcttgattctttgtggatgcattaggagagtgtttcttcataggatataatattttgtaatttcttattctttactgcttgctgcgctgtaaaacgtttataaaatgagttccttttggggtgtgaaatgagcaatcatcagaggaaaagcattaaggacaagaaagtggagtgaggatcatgaagcatgtgcatttctttctcaaggtcatgggtaaatttcagctccatggaaaatcttgagaaagaatccagcaagaatgagatcatgaaatgttagctttccccaagtagaaattccataattgaactataaaattgctgcttacaaattttttcttctaaattccacttgaaattagggaattgaaagggccaggagggaccttggaattcatctagtctgaattcattatacataggaaaagttaagctgagccattctgcaagtcacactaatgtgacatagaaaatactagaacctaaggttctgaattactgtttcaggtgttcatctgctacaacaaacatttatcaaacacctagtaggtataagagatcatttaaacccaccccaaaggatacaaagttgaggaaatcactctttgcctttgcagaaatcacaatctattatcaaagcatatgatagaaatttcaatatctaaaacacaagatccaaagtgttgagtgccatgagaatgatataagagtttaagaagggagagatacaacaaagtttgggcaagccagtatgtttcttgaaggaatagcacttaatttgtgatgtgaagataaaatctcagtaaagaaaaatggggaagcagatggtaagcctggcagaaggaatattattagcaagtgcaggaaaatatactctaatcaaaaagagcaagtagcctaatgtgactggatttcaatttacctttacatttttctatcatgttatttcatgcccataaattatggcaatagtctaaatgaacttgaatatcagaccaaattgccttgtcttatgtagtaacccactcaagtttctaagcagaaaataacctgacccccattctctgagatttgagaaaaaattgtgtatccttcattaaagtttggaatgcattttggaaggaaagaggaaaactgaacgaatatgtcctgaccacgtgtattactcatttgctctgaaagccataccctgcccctttttctgctcagctctgaatgttagtctcagacttaggtttagctaagtgaaggcagaggagcaggcatccaaagggtggaagggaaggagaagccagactatttcttctcactctctgtacttgaggtagcatctcttctctggtttcggttcctgttgtgcagtctttgccatgcttccagcctggcagccttggcatttcctaagcagttccttctccatgattccaggtcctactgaggccccaactcagagaatcccgtagtgccattgcctccctttgtgctccatttctgatatcatagagactttctgttgttgctaacctctgggtgcttcacatttccttattaactttttccactcttccaatataggatattaaaaagcatattactgaaatgttaaaaagcatatctgcctttagatataattaaacaaagggcctcaaacaaagtcaccatggacctgcctctttctccctattcctggactcttctgtgctctttttgcattgtctttgctgtcaggctagttctttctgcataattggaaagatgactgttgcttggcccaagtctacatccttatggctcataatccaaatgaaaaagagattatctattttccagaaaccctgtattaaatctcaaatttgaatttgattgatttgctagagggtagggtgatgaagttctctggtcctggtcattggagaagggtaaatgttatttcagcctcattcaagttttatggagcgaggcatagcatttactcaaaagaagggatactgggcaaacaacagtcatctaatacagacagatgctgaaaattatctatttgctcctccatatccactcttcatccttttctaacctgattttgtgcaaaggaagctcacctccttggccactctcttcctttgtcctctgactttacgtcaagtgcagccaatggagcacattgccatgggattggaaagcaagaggaaagagccttagtggggtttattccacccccacctggccaggcagtgatgtggcagtggcggtggcagcatccctcactgaagcagctcttgctgggtagtatctcccatgtgcaggttccccagtgctctgataagagctcctacctcccccatccctacaggactgatggtaggaatggccttcaccacctctagtccttgggtgcgtcattgcttctagtgggttccttagctttgtccataccctgaatgaactcttgattaaaccctcttcagttatcctttttttagcatgccaactgatccagccaggacctggtacttatgggttaaatgattattgccactttctagctgacaaagccaagcttaaacattttcagaaacttactagagaccacacaatgaggaggaggtgggtttgggactgaaatttttgtttatttgccttcaaaatctggatcttaaaagaacaatttctccccctttgacagacataaacccaacggcatctgtgccattgtcatgtgccttgtctgtctaccttctacatacatccgattatgatgggccagacagacagggattttggcttccttagcaaaattggctcttaagttaaaaggaaaaacaaaataagatggagaatcccctctcctacattcacaacttcatggctgattccagtttgctttttgttaatatacacattccatttcttatagtctgtgagtaaatgggcctttcataagcccatccaaagggtagcttacaattttcattctgtcccctctccttgcacttttcttaaagtgaatgaattactagttaatgcctgagagagtaaaatccctgatccaattttttcacaaaatgtatagttttatgtggaagaaaataggagtctggaagatactcagcctcaatgaactttactcctctgaggaaggttagcaagagggataggagtcaggagaggcaccctcattagtcaccagctctgattgtaaacagtgggatcattgcttttaattctttaccatagaactttctctggcaccagattcatgtaagtataattcagaaatgtaagtggataacagcttattgtccaaggttcccaaggaccaaaaaagaaggtgcaaaaaatacttaaaagtagccaagtaactctgacctggagtgctgaagttcattccctttctacatcatttgcataatatctccatatccaaatggtatcccagaatacatgaaggaattaggaagtctaaaaagttaaatggaaaataatagcatgggtaaagtgcaattaatgccataagcaggaaaggcaaatacactgatttagctgagatttaacacaactttggaattcaacttggcaaagcaagaggggacattggaaaagccgtaccttgctaagagagaaagtagctttctattctgaagcagctatatatgtgcagtcatagaaggcccaatccacgagagaaatgagcagtctggtttatgggaagaatccaatgcaagaaggcatttacatgtagctaaatcactgatcttgagaggtcaaggaagatagaaaccttatttaatgacaaggtaacaaaaacagaaataacactttttaaattatttttaaaatcttacttgtgatgcatactaatgtcccagagttgtgtgggcttttcttcagaagtacagattcacaaagggttatttatttatttatttatttatttatttatttattatactttaagttctgggatacatgtgcagaatgtgcaggtttgttacataggtatacagatgccatggtggtttgctgcacccgtcaacacatcatctatgttaggtatttctcctaatgccatcactctcctagcccctcaccccataataggccccactgtgtgatgttcccctccttctgtccatgtgatctcattgttcagttcccacttgtgagtgagaacatgcgatatttggttttctgttcctgtgttagttttcttagaatgatggtttccagcttcatccatgattattttgagaaaagtttagagtaaaacaaaggatagaccaagggcctctgtggtcagagtttgtgctctgaaagggggaccctctctccatggtgctaggcagtcacagtgatacacagataaaacagaaatgatctccctgttttcttcaacaaagttccaattactcccagcatcttcacaatgggtgagaatgaacctctgttgagtgcaacatgctccgtggtttgtgtttctttacttttttgttttgctgcaaggttgcaggctcctttgtagtctacaaacaccttgagagcaggaatggcctttattcatcattgttcttatttcttagctcaaggcctggacacatagcaggcatttaataaagtgagttctgttaacctcatctttaaatgttgatgttgttttcttttcaggagaaaaacttatttaggtcacagacatacacacataccacatgcattcacactccagaaaagtaaatccaacacatacacacacacaaagaacaactgatgtaaaaaataataatggtaaattgaaggcaataaaacatttatttttatactaaaattaaaaaataagatatgaagaaagctgagcataaaagattgacatatacagaagctacaataaaacagacccacaaagcattatttcatgtcttcatgtattgattttttttctctaacatggggaatgaggtaggttttccattgcctcccactttctgttggctgctgatggctacatttccttttctgagaatctcacatattgaccatagatattgttgtcactaaataaaccacaggcaccattaatcaaataggaattagtgaaagggaaagaggtatagtgggttgaataatttttccctaaatttatacgcatctgtgtcttagttcatttgagctgctataacaaaaataccatagactaggtaatttataaacaaaagaaaatttattgctcatagttctggaggctgggaaatgcaagatcaagatgacttcctattcagtgtttggtgggggtttactcactgcttcatagatggtgccttctcgctgtgtcctcacatggcagaaaggttgaccaaggtccctgaagcctcttttatagggtattaatccaattcatgaggaatcagtgttcatggcttaatcacccctccccccaaaaaaagccacatctcttaacactctcatattggggattaagtttcaacacatgggctgggcatggtggctcatgcctgtaatcccagcactttgggaggctgaggcgggtgaatcacctgaggtcaggagttcgagaccagcctggccaacatggtgaaaccctgtctctactaaaagtactgggcgtggtggcacgcacctgtaatcccagctactagggaggctgaggcaggagaaccacttgaacccaggaggcagaggttgcagtgagctgagatggtgccactgtactacagcccaggtaacagagcaagactctgtctcaaaaaaaaaaaaaaagtttgaacatacgaattttgggggtatacaaacattcagagcattccaacctggaacatcagaatgtgaccttatttgaaaagagaatctttgtagatatatttgggatataaaaaggattctgggataaaaccaccctggatttacagtgcatacaaaaatctagtgtaatgactggtgtctgtatgagaagagggaaaaatacagagacacagggtataaggccatttgtaacctctggcagagattggagttatcctgccacagaccaagaaatgcaaaggcccagaagaagatgaaagaggcaaggaaggattgcaaccttccaaggaagggtgtccctgctaacaccttgattttggacttctgaccttcacaacagtgagagaatacattcttgttgtttaagccacccagtttgtggtactttgttacagtggcctcaggaaactaatacaggaggttttttgtttagcatattacaggatattgacttgagtaggaactcagatttcacagacagatagttggatgaggtctatgtattaacaccacattgaatataaactctataagtgagaagcattgtttccaggaagagcaaataccacattccaaccatattgatggttgttgagtcagggccctcttattctatgagattcctgtcgaaactaccttatcagcaactgtctggctgagagcaagaataatcttttgcctcttttatacacagattttatgtagttaattaaataaatgttaatttaaattaataaaaatcatactaaagcaatttctaaaaatatatttatcagccacttttttttgtaggtcttcaatagaataatgaaatccatgaaaaatcctcgggttttcagagtttcatcttgatatcttagcattctgtcaaactataggctgagggagaaacattctgcagcttcccttagaagacccactttggatccacctttccgcagaggcatttttcaggatttctgtgtctagatttctccctgggaaaaccagggataaaaccatcagtcacatcacttgcagcccagggaatgttcagctggcacacgtgactagatcagtggtagaaggcatgcaggacttaggatttcacatttctttacgtttgacctttacatttctaacaagaaaggcattgtttattaatgtcttcattttacacaggaaaaaaaatgaagatcaggatagttaaggcagtaattttcctatgtttttcactcttttgaggaacgggctggccctgggagatgggatgcagtgagaaggaagaaaaggcagcctagcttttatctcatcaaagtcaaaagtcttatggacacacctttgcaatacctctcctggaagtgacttaagtgttatgtatttccacatgcccttattttagtaatttttccatgggaaaacaaacccatgactcagtaaaatttgacaaagtaaatcacctaaaatttcacaacaaaactccccctaaatggcggtgggaagccatagttagaaacaaattttggcctactatttttcaactaatttttaaaatagtggtaaaatacacataacataaaatttaccatcttaaccattcttaagtgtgcagttcaatagcgttaagtgaattacattgttgtgtaatcaatgtccagagcttttccatctgtcacaactgaaactctatccccattaaacaactcctcattttcccctctcctcagctcctggcaaccataattctactttccatttctatgcattttattactttagacacttcatgtaagtggacccatagtatttgtctttttgtggcttgcttattttacttagcatgtctgcaagatgcctccacgttgtagtattgtgtcagagtttcattcccttttaaggctgaataatattcatatatatatatatatatatatatatataaattttgtttccattcatctgtagatgaacacttgagtagtttctaatcttgactattgtaagtaatgctgctatgaacataggtgtacactctacctactacttttaatcacaatttaaacccttccattttgagaaaagttgtaaaataacagaatatgttttgtttagaaaattaatcatttttattctcagatatgagaacaacacaaagtatttttctttgaagttcataaaatgccattgcataatttatttttacataaaaatactttctgggttgagcatggtgactcacacctataatcccaacactttgggaggctgaggtgggaagatcacttgaggccaagagttcaagaccaacctgtgcaagagagtgagaccttatctctacaaaaactttaaaaaattaaccaagcatggtggtggatgcctgtagacccagctactcaggaggcagaggtgggaggatagtttgaggccaggagttcaaggctgcaatgagctataatcatgccactgcactccagcctgggcaacagagtgagaacctgtctcaggaagaagaaaaagagaaggaaggaaggaaggaaaaaaagaaagaaaaaagagaaagagaaaagaaagaaaggaagaaaggaaggaaggaaggaagaaagaaaaaaaagaaagaaagaaagaaagaaagaaagaaagaaagaaaagaaaaaaagaaagagagagaagaaagaaagaaagaaagaaagaaagaaagaaagaaagaaagaaagaaagaaagagaaagaagaaagaaagagatgaaatttcagagtacgttgctactttgaattgagttgtgcattgggaagcatcagtctcccagggagggacagagagctgataaggtagcatgcattctcccaaatctgtcccacccagggaataatgtgctagatttttctgacatgcttctggagggtgaaaatgctaaaagtccctcgcagaatcatttcccattactaaattcacctagtttattacatctcatgaatgaaatttttcaattaagtctttcccttgtttttgttgtgttgtaactactttaggatgactgttctacttagagatggtatcttagtccatttaggctgttacagaaatttttgttacaaaaataccataaactgggtaggttataaacaacataaatttatttctttcagtactagaggcttggaaagctgagattaagtcactatcagaatcagtatctggtgagaccatttcctggttcacagacaatggctgtcttctctctgtgtcttctcctgcaattgatttctcttgcagtggatctcttgcacgtctttgataagagcactaatctcattcaccaattcatgaatcactaatcacttatgaaaggctccatctcctaatgccatcatattgggaattagaatttcaacgtaggaattttgggggaatattagtctattgttcatggtttgatgacctaattctcatggtggttttaacccatgctcccttttaataaacataaaatgttgtaaaattatatactttttctcatagacaactcccccccttcctcatactttatcatctttaaaatcgctgatatacttagaagatggtttattttctaggcatttctgcagactgattaggtagagcttttatttttctttggccaaagattatatttcttttcttttctttttttttttttttttttttttgagatggagtttcgcttttgttgcccaggctggagtgcaatggcccgatttcagctcactgcaatccacctcccgggttcaagcaattcttctgcctcagcctcctgagtagctgggattacaggcatgcgccaccatgaccggctaattttgtgtttttagtagagacggggtttctccatgttggtcaggctgacctcaggtgatccgcctgcctcggcctcccaaagtgctgggattacaggcgtgagccaccgcacctggccttatatttactttcaagtatatgcattctactttgatcctcctaattctgatcctctctccattacctcctccccaaaaaccttctaaggatcatatcattttaattaggaagttatttggctacattcaaaatatgatttttctttataaatattggactaataactccaatttgtgcacacgacatctgaagaatgttacaaatatgtgtgaactctgtaaggctcccagtccaactttttttttgagatggagttttgctcttgtcacccaagctggagtggaatggtgtgatcttggctcactgcaacctccgcctcccaggttcaagtgattctcctacctcagtctcctgagtagctgggattacaggcacttgccaccatgcccagctaatttttgtatttttagtagagacggtgtttcaccatgttggccaagcttgtctcaatctcttaacctcatgatctgcccgccttggtctcccaaagtgctgggattacaggcgtgagccactgcgcccagcccctgtccaacttttatttcattttcatctttcctaatccagccttgtgttggaagcttcttcagactaaaccaagaaaaccttaggtcttcatgttcatatggggactttaatgttgatatggtgtttgtacactttaaaatatttccacatatgttaaccttgtggtgattctctgaggcatgacagatactattttccttgtttcatagaagacaaaacttgaattacagagaggtgaagtgaccaccctgagggcttccccagctagcaagttcaggataggctgagctggattccaggttctctggcttccagtctggtactctttctgctattccatgctgtgttttctgattgaaaaatcataagtctttggtatttctcagcttggtcaaatttgtttaaagatcacttagctcacttttgtctgagtccataccaaccaagtgatcctttaatctgtcttactgagtaaatgcacccttcctgaagtgagtgagtgccctatggagttaggtgctgagctgagctgcagtcctgggttatttattgccaatttggcatcaccaactctcccttctaagggttcctctgtctttcagaaaagttgggagctacatttgcagaacgcccttcccatatggttacaggttggtttaccaagaagtcccttcccttgctgaagatttggaaggctgaaacaaatgacaggctaaagggggttaaaggcagaaatgtggacaaccatgagatgctaagaggctccaccagaaagccactccttcatcactgcagactgtgatggttgaagagaaatatctggaagttcaaggacaatggacaatgaagaggaaactgttcagctgggagctgagctgaggttgtccaccgtggcttcattgacctcagcttcccctagtcttccaatggttgtataggcttcttgacatctgcattaaacctttttaatttggattatctagagaaaccagtttttcttgactaaaccctgactgatagactcattcccatgctaagtgctaacatttggattatgacttttattcttattgctaaagtataatttcaaacgatataattaggacactgatgcaaatataatatgaatatatggcaaggattttgttcaactcattaattaggtggggaaacaattagatattaagaccagttcaaacaatatttgaggagctaggtatttatagaccatttaattttaaaatgttaagatatttgggttatatataaaacttgttaatatcttacagagcaatgcataataacatttggggttatattttccaccaaatcatgtgcctttccatgggacaaaaatcaacatgttaaagtaaaacttctgggaccttcaatagatattttttaaattagcatcatcatcatcatcatttgctatacacgtgataggttatagacactacagtaacatgttctcaaacatgtaattgtcctttcaacaattctgtgaggtggattttgtcatctccattttagagatttggaaactgagcccagtgaccccacctgacctcctcaaggtcatggactgagttagagctgggatttaaatccagatttgtctcacactgaggcctgtgatttcctcctagttcactatcacctaattaattcagatactcctgactctctctgtgttaattaataaaatcagcttggtgaataacaaggttgaaaactaagcaaaggaacataactgaatacaaaatgttattacaaaagattaacggctttgaaaagtaaaagcagtatgaactatgccatgtaaaccttagggggataagggccttagattattcaaaagataaatatatttggaaatttttttaaattttttatttttttaattatactttaagttctatggtacatgtgcacaacatgcgggtttgttacataggtatacatgtgccatgttggtttgctgcacccattaacttgtcatttaccttaggtatttctcctaatgctatccctccccgctcccccgaccccacaacaggccctatggtgtgatgttccctgccctgtgtccaaatgttctcatttggaaaaattttaacaactgagattaaaaatccaaacttgccatttccaccagattacgttttcatggtctgtgatgtgccaagtataaagaataggagtaacataaatgcaggccccaaccaagcagagtctctcaaacttgaatagagcatggaacctacttagtagagggagcgagggagacagagttcccagactctgagcctacgccctctcatccaaaagtttagagagcacagcttgcgagattcatggtcaaaataggcctgatcatttttggtgctagaataagataaattgtgtctttcagttaacatttttctatttgcaacattcttacttcatcctcagccagtgtaaaaatcaaagttttattgtagattaaagaaaataaatgaaaacatggacaaaaaagataaatgaattagtatgagttgtggttaagggcatagactctggagtcagaatgtctgtgttcaaatcctgactctactgtgtcctgtgaaactttgggttggtcactcaacctgtctgtgcctcagtgttgtaaacgtccagtgggtttaccttggccactgcctagacagagccaattaatcaagatgggaattgcaatagagaaagagtgaattcacacagagtcagctgtacaggagactggagattcattatttctcaaatccatctcccagagctttcagagtttttaaggataatttggtgcatggaggaaggccagtgagtccagagtgctgattggttaggtcagagacaaaatcatagggaattgaagctgtcctctttcactgagtccgttcctgggtgggggccacaagatcagatgagccagtttatcgatctgagtgtttcaataaactgggtgccagctgatccatcaagtgccgggtctgcaaaatacctcaagcactgatcttaggagcagtttagggaggattagaatcttgtagcctccagctgcatgactcctaaaccacaatttctaattttgtaactaatttgttagtcttacaaaggcagtctagtccccaggcaagaaggaggtttgttttgagaaaggggtgttaacatcttcgttttacactataaagtaagttcctcccaaagttagttcaccctacacccaggaatgaacaaggacagcttggaggttaaaagcagatgcagttggttaggtcagatctctttctcagttataagtttgcaatagctgtttcattgtcttcatctataaaaacaggactaataagaattatacctccgttcgtcaacaccaacatctttgccaggaccaagatagaccccagtgccttggtgcaaaagctggagctggacgtaaggagcgtcacttccatcaggagaggtgcagaggccaagaccgttttgcccaaggagaaaatgaagctgaggcgtgagcaatggttgcagaaaatcgaagccataaaactggctgagcagaagcacagggaggagcggaggtagagggccaggatggtggtgggggacctgcacccgctcagggatgccctgcctgagctactggggcttgaggctggcagccggcgccaggcctgcagcagggagagcaacaagccctggccctcagagctcagccggatgagtgcagcccagagacagcagtttctcgaggaagaaaggacccggtttcaggagctgctggccagtccggcctacagagccagccccctgttagccattgggcagacgctggcccggcagatgcagctggaagatggtggccagctctgaccagggcagcgggcatgccacaactcctcgggacacatgtgtgggccaagtagacagcaccagcccctcaaggaccatggcctgagcctggtggacgcccttccctctggtcggttgtggggctcaataaatggctctgtgaacttcccctgcacccccagggccattcccatgagctgctccctgattcacagggctgggcccaccctgggacagctgcccccgctctcctcaggacaacaagccacatccctccactgggggccccagcccccacgcagtcagggtgtaccgtgcacagggttcatagggactgcagttgtggaggccccaagtccgtccctgagcaggcactggtgccgccaagatagtctcctggctgtgttggaaaggaattgtgcctgggtgtggccccagctgtgccaccagccgccctgatttgcttcagcctcggttcctgctgcgaccctggtgggatccagaagcactgaggcctgcaggggctgccgtggggactggcttggggccctccccacctgggtgtctgtttcccttccagtctcccctgccaccctcagtgaccagggacacagatggccctggcaaggcccccggcctgctccttgcctgttgtctgcacccccctgggctgcatcccccctatcccacccattgccctcgccctacccagctgctccaaacccaggcagcccactgccttgctctggggacggagagcagagggtccttctgcagggaggagacatggagtgggcccagccctgaagttcttgctgacccagaagtgagagaggtcctcctttgttgttagaagccctgggatttgggggttggtttttggactgtgaatcagtgactgatcagttcttgttttcaagttgtggaaaccaagggggtggtgcgtccccaggcccctgacgcccagcttggctccccctgcccgagctccccccgtcccagtgctctgtggggcctcgctggcccatgtcctgcagcagagctgggcaggctgggtgtggtggtgcaccctgctgggggtgtctgggaagtgcagagcaggaccactctcagctcccaggtgggggcccagcaccctgagccttcccaggctgcctggggtgggggtggtcccagggactccagggcctcctggctccagggcatgtgggtggcccctgtgcacagcccctcttgttgtgagcccccatggtccgacctcccctggccctgctgcctgctcagggttcatagccccagcagccctgccaaggctgcctggagagtgggtggccgaggcgagttggagcctgcgtcccttctgttcagtgtcctggcccttccctgacacgagcagacacggcatccacagagacagcctggacaccctccaaggccccagccgatgggacagacaggcgtacaggagccacaggcagcagatcccatgctctctcagccggggccggcttggctgcccagccccagctccttagagaacgggcttctggcttcagaggagctggtcacaaaccaatgcttgcgacaaaaccatttttgtggtagagcgagtgttgggaacaacgtctgtgggtctgtgggatgcacgcagggaagtgtggtgggggtgaggatgggggcggcttccactttctccagcatcctaatcccacggtctgggtttcttgtgaaaaacctggccaggcgcagtggcgcacacctgtaatcccagcactttgggaggccaaggcaggcatatcacttgaggccaggagttcaagaccagccaacatagtgagaccccatcttgacaaaaaaatacaaaaattagccaggcgtggtggtgcgtgcctgtactcctagctactggggaggctgagatgggaggattgcttgagcgtaggaggccatggctatagtgagccaagactgtgccacagcactccagcctgggtgacagagtgatcctgtctctaaaaaataaaaatttaaaaacgcaaaaaaaaaaaaaagaattatacctcatagatttctatgagaatgaaatgagctaagagtcataaaatgtttgaaaaactagctggcttaaataagtattcttattttttaaatatctgttaatgaagtattagttagctttttttttttttttttttttttttggtaataagcttgggtattgaccctaaggaatgttttgcacttaaggtagagtttgcctataaaaatccagcctgtacattttgagaaaagggatatcagacacttgattagctctatgtggtctttgtatcagaaattaaacaccagctgttgtaagagataaagcctgacatctcagtggcttaacaaaaagagatgtttatttttcataatgtaaaattcaatctgcaacaaggattagggtgagagtgggatctatggttgtattagtctgcttaggctgccataacaaaataccatagactgtttggcttaaaaaacaaagcatttttaaatcacagttctggaggctagaaattcaagattaagatgctgtcagggttgatgtctagtgagggctcttttcctcgctatcgggggaaccagcacccaatatttcaacataggttctttctattttccctaagtgtcggctggtctgagaaataaagagaaagaatacaaagagagaaattttacagctgggcccctgggggtgtcatcacatattggtaggactgtgatggcaaccatgagccacaaaaccagcaagtttttattagagattttaaaaggggagggggtgtacaaacagagagtaggtcacagggatcacatgcttcaaagggcaatacatatcacaaggtgaaggcaaaattagaattactgatgaaggtctatgtcccactgtgcatgcattgtcttgataaacatcttagcaggaaacagggttcgagagcagacaatcggtctgactagaatttaccaggctggaatttttgaatcctagtaagcccaagggtactgcaggagaccagggtgtatttcagtccttacttcaaccacataagacagacactcccagagcagccgtctacagacctacccccaggaatgcattccttccccagggttatcaattattaatattcctttcgaaaaagaattcagcgatatttctcctactcacacatctgtctataggatctctgcaagaagaaaaatatggctgtattctgcccgaccctgcaggcagtcagatcttatggttgtcttcccttgttccctgaaaatctgttactctgttctttttcagtataagcagagatatcatgcacaaatcgggtgatgaaatccactgatttggtattgttcaaacacgcaattttacaatcagtttatataatagtggtcctgaggtgatgtacattctcagcttacaaagataaaaggattaagagattaaagacaggcataagaaactataagagtattgattggggaagtgataaaagtccatgaaatcttcacaatttatgttcagagattgcagtaaagacaggtgtaagaaattataaaagtattaatttggggaactgataaatgtccatgaaatcttcacaatttatgttcttctgccttggctgcagctggtccctccattcggggtccctgacttcccacaacatctagctcatagatggcctccttctcactatgccctcacatcttctttcctctgtgctctcaatgctgggcagggggagagagagcatgctctggtctttcttctacttataaggagaagaggagagaagggtctacatagtctttcagagattgaggctgaaagaggatccaccattttcagcatggagcttctgggatctccctgagtgtcaatattcagtagcaagtgaagagaaagaattgtacacaggagggtaagtggctgaggtcagtaatcacttctgcccacttcccacaggctgaatgcagttgcatgccacctaactgcaagggagactgggaaacactgcctacagtgtggaaagaaataaatcttgtgaataactagctattgaatagttctattgaatcttcctcacagtccttggacctcctaggggaaaaaaagtgcaccttttcttaactcttccagagtgttctctagttcatgctacttcaagttctttccccaaacttttctcacctatgttttcctatggggctatctgactcagttcatgggcaatgtgttcctataaagaagaaggagtgtagggccaccttcagcttatgttttagctctagaggatgagagaagagccaacgtgtgtcagtttgaggatggatgtacagtgagtagtgaggggctttttccaccttgaatgcatgagagctcttgagcccctcccactgcattttcagagtcaccagatctgtgcatgatatctctgcttatacaagaaaagagtccctgtgattgctctgtattttctgtcatggtaagaatgaagagcaagagagctaggataaggccctagaaaaaggcaatggcaaagctcagataaatgcctttcacccctaccactatctctccagaaaaccccatgtaaaccttgagcacactgcaaagtcattggacaggtttctctccagcaagaaagccccatgccccctgccagttcactggggcctctcaggcaccattctcaacatgagctattggttgggtctggtatgtaggggagctgccagtgccactgaagtcacgtgataattgtggtctcctggccaggaagcagctgatctagcttggggacagggcaggcaggatgtgccattgattcccttgtgagaaattcctaagaatctactctccatctgcaattaattctcccaggagaattaagagatttttttttctcttttctaaagggaacaaataaaggcccaattatttttccagcagtctgagtttagagtctacaaattctaattttttgtttcctggaaacagtaaaattccattgccatttgttttcttctttaaaatcccctttactgcactttcaaagtaagctttcctcatagccctgaagagcctttgtctttaggttgtcagtaaaaacaagttgccccttttgactcagttggttgagatatagtatactgaaatgcacccagcaggccattgccaaagttgtggtttttcaatttatgtttgagacaaaagagtccaaggagaattccacttgtgtaggttgcataagagatgacaaacaaagctgaactggataagagtataaagaaagtaagagaagcaaaatgtgtgatagaggccacagatgctgccatatagacagcaagatggtgacaaggtgaaaaggggctgcaaatttattaactggctcagtccttactgagagctctgcaccatatctcctccacacaggtgcagattttgcttttagttttacaaagattagagcaagaaagaagctgcttttaaaacaagaaaaaaaaccactttcagtgcaccatctcgtataatattatatcctattgtaccctgccatggtttaggcatcactgtattctctcattgtgtaatatatatattaagagctaaataaatgtctgtttcattgaaggtaagagctaaataaatgtctgtttcattgaatagttcagctctgctttcacctcttctaattaaaccaacaccacatgccacttgctacctcctgaacaattactacttttgtgtttcttcatttatccaacaaacagctccaaagatggaacattcaactctaacataaaccctgctgcttccaggggctctgcgcccatccccttgttatgctacactgacatttagacctactagaaggtaactgtttttcatttatgtgtccttacaagtcccaataagagtccctgaagaaaaaaggtacattgcatacccaacatcaattacatttatcttccctcatatgcaaagcatcgtatgtttccacattcaagaagcaaactcatgagtcatcatgggaacaccatgacttttagattcagactgatctatattcatatgtggaactgattccacattacatgtctagctgtaaaactgggagtaatgtatgtatatgacctttgtagatctgtttttttcatcggaataatagcaatatttagcttgcaggtttgttctgggaattcaatgagatgacacacatgcagtggggctgcaaatgtactgatgttggagtcaaaatgtgggaaaaacaggggccttttagtgttctatatgcagactagtctttgtagacttgcactcccattgatagtggaggcagtcgtgcgatcttggtttgatctagtaattgacatgtcatttagttaacacaatctgttttagatgcttttcagactttcagattctgtctcctactcctgaacttccctggaatgacaccaagttgtatgaggggtttactgtgtccttgtgatagtggggagaaaaaaaattcagatcatgtggaatccttagatgccctctatgcccagctgtggacaggctggtccacctctccttgtctgaggattgctgagctctgtctagctctgcctatccttttggagtgaagctttggcttcctggagtccaaggtttcaggcatttgtgtgtattcaggtccacccccactttatcctatccactctgaccccaagcttctgacagttgcccactcctttctcaacacttccacatcccttctggagcatttgggaaatcttaaatccctgtcataacaagtgcagacaatggagagccagggctccatagtggactcaccacctgaacccattctgcagtcttcccacagaattgctctggagccatgatggatctggcatccagctgaaggcacaaattgttctaggggcctgcagactctgccttggaaaataatctactcctctgatattagtgtattgccccatacttctatgttcctaaaagacttttgcatttgatgtatgattcttatgtgggaataggacctttttgttctactttttttttttctgcctccattatctgacaggatggtaaggggtaagctttcctgttactttcccttcctgtctgaatgcaactgtcctatatcatttgctactcattcctctaagattgcagtctcaaagttcagtccaaatgatgaaattggctgtatcttggtttattctggctactacaacaaactaccatagactgggtagcttataaaaaacagaaatgtatttctcacctttctcaagtctgggaagtctaagatgaaggcaccagcaaattccatgtctgctgaggcctgttttctggttcatagacggtgctttctcactgtgtcctcacattggtggaagaggcgagggcttttccttgagtacctcataagggcactaatcccattcatgtggatctgcccccatgacctaatcacctccctaagtcttcaccctctgataccatcaccataggagttaaaatttcaacatacaaattctgagaaggcagaaacagtcagaccctagcagggtgcaaggacagaaatcagcccaaccgtaagaaaacttagaaaatatatctaaaactttatccctgttatagatggaaaatacttggtgcagagcctggaatcttctatgaacttggataggtgaacaacactgtactacatggtgatagctgtgaaggatccaagtgttacacttagaactgacaaattcaacatattttgtcagacaagcattgggctcattctgtccattccacagtctattggctgaactctgctaaacctatgtgattaaataaagacatctgtaaaagtcctaatgatggtcacactacaaagctctttgagtaactaatcccagtgttagccagcaatgagtcttagggaagttcttcacattcacctggattccaaatacctaataaaaaagagcaagtgtcaaactcagagtgtgtgtctctctcttcctgtttatttgtgaatggcttttaatgaataggaaaagaacaaaaagtataaatgcagcttgtcaaccacagcaatgtgccttttcaacttttagctaagacatgaaaagttataatttcactactttttatataaacataactgcatattttcacagctttgctttaagacttaagctcctccagctgatcataaattgccaggaaatgtctgcccagtctatcacagtgtcttaattaagcaaaggcatagaaattatacgggggccttggcccatgggactcaccaggtgtaatgaattctgaagaagcagtagacacagattttccagggtgggctaataataaatactagtggaaggacaacagaaataaagttttttctcttttctaccaatctcttccttttgaaaaagatagcaacaaagatagcttaaagatggatctttaagcctcaattttgatgccatttctttctagagaatttttggtttctcctttccacactccattataggctgtgctaagggaccctcctctgaactcctattggtaaacaacattattattgcattattcacacctgccataattgtctttttatatatttgtctcccccagtaagtctgtggccttgccttgtgtttccaataattcactcctcagagggatttcccagggggctgggggcagagaggggcccactgataaacagcagatgcccagtaggcctgaggcatgtctgacacctgtatgatgaaggagatgggaaaaaaggagaagcagctcctgggatgacatagttaagagcccgaggaggtgcattgctttaaaattactgatcataagaaacagttcctgcaaatggtgtggggcatgcaaccttctgtccatgccaattcacttggtaaacaccagaaacagaattctcattgggtacttgaagctcatagaaatgtcaagagtaaaaggaatggtgcagttggaattcctgtgcaatttgaagctctcacttgaaaatgagagagggacaaggaaccaggagtgaacagaccaggggatcaagcaggaataatatgtggttcaatacttgtccaaagtaagagagatgaaatattcactactttagaaaaactaaagtgctcacctttctgaggtcatggccttccaagaagagatattttagttgcaataaatgagctctttctacatgaggctgagggtttggcttccttaattctgcaaaaataataataataataaaaagagagagagaaataaaacgcacccattgatgttcaaagaggaagagcaaaagcctgaacttgccatatcaatgactaactatagagttattcattggaataagatacataggatttgcatcccaagagagggcactgaccctgtttgagaatgatcatttggttaagaattgtttaatttccttcctttttagaatttgaaacaacaaaatctattaagcaaaaagtggtaagagagcacaagatgcaggagactttctctgtcccaaaagaccttacagacttgttgagaagattgtatgaataagtgaaaatcaccaaacgatggcatatgtgcttggcacagagtgggcaattggttaatatctgtatggattgctgcttagctaatgaagtctgtggtgtatttactagccttgagtacataatgttgactaaactatgctccgccctgacaaaccatgaggcctgctcttcgcaccgctcccacctcgggcctgtacaatgaatccctgagctccctgtccttaggagtcactgccctttggtcttgtgaggcctttcagaccacacccctcctgtcctaaccttcttccctaaccttctcacttaattgccacaattttagtttgtttgccaaaggaaacgaatctgtgtgaccgtgaaagtaagaagtaatatgaagtaatataaacaagtggcataaagtgttgtgttgattttgtattgagatgagaagttgatcagctcgaacccagaaggaaggtagtgcccttagaggcagaagtataaattgatgatccaggtctgtctcttcgaagtgtgcacccttgagcaacttaccaattcacaaaacccaagtttcctcatgtttgcagagaagggatcccagctgtggcacaggctttgttgggccagtggggtgagcgcagctggagtggacagccttaagtccattttgcatgaacaatggcttgtttgaatagaaatgctggtaggtcttttattggtggtgagagagggcaataacaagtagaatgtaggtgacagtcaatcaattatttcaactcattggtgacagtcttttgggaaatgcagattacatactgtcaggcctctgagcccaagctaagccatcatatcccctgtgacttgcactatacatccagatggcctgaagcaactgaagagccacaaaagaagtgaaaatagccttaactgatgacattccaccattgtgatttgtttctgccccaccttaactgatcccaaaacctataagaactaatgatgatcccaccaccctttgctgactccttttttggactcagcctgcctgcacccaggtgaaataaacagccttgttgctcacacaaagcctgtttggtggtctcttcacatggacatgcgtgacaaagggaaatcgttccagccttagaactgtgcctttctctgaggagggaaccacaaagtgttaaggagggccaggcaacaggagcctaagcaagaagttaacactcccagacctaagcaatctaatcccaatagcgttctgggagagaagagcactaaatacttcctcagcagagaacaactgagggtctccaatgccttttccatctcaggcagccaagtctctgcttctgactccactgaagagactggaggggcatcaaagaagaggagctccagccataaaatcagaaaagcatgaaacatttggttggaggatgagaaagacacataaaaattcttgttagcatgcacgttacctttaatgaatattgatctctacctttacacatgcttattagcatgcatattggagtaaaacaaattggcagccaccagttttcaggagagatcctgaaaagtttcaattaagctaaacacggcaagggaaataaatgtacatgcattactactaatttagtgtgagaaaagtcatcgattgcctatatttggtgtttatttttgcagttaaatttccttaatggaaaggtatttgtaggagcttttagacacatatttctgacctttgtcttcattctattttcccccttaaggtcttcatttcctcaaaagtgaattctctcaccacaggaattttcccgatcctttcttacttccctgtattagccagccacttacacagaaataatgatatggaaggacagaaaaagatgagacaacccattttcctttcagcccttccttaatcatctgtaagccaaagacagaaagcactgataggatgtgctgatatcaagaagtgaaaagacaaaacattggagataattcagtgctaggtctccactcctctggttagaacaaaatacatatgtatccatgaactaacaaatacaatttgtgaagttttagtgattctgcacacatgttaaatgtgttaaattaaatatttaatttaaaatggggattgcacagttgattttcaatctaagatattctatcgctagtttattactttgggcaagttatctaaaaatctgtgatcctgtattctatctttaaaatgaaagcaataatatttactttccagtgttgcagtgtgaataactgaaatactctaagtagcagttattaatctcaacaatcatttatttggcttctgatatatacaagagcccatttgaaattcaaaataaaatatagtttctgatctcaagaaattcaccattcaatggaatagacaagattatatacatataaatagaatgagatttagaagtgcctatagaggtagttacaaaatgctggggaatatagaaaagcatcattctaggggatgggtgagatttctccaggtagacaaaatgggtagttgttcccatcatgggaagggcagtgaaaagacgtgatgtggtgcagcagcagcgtgacacactgcacagccaagaggaggtggaaaagcaaccagggcctgatcacattcacctgttaagaaatttgaatttctattgcagtttgtctcttaaataggatctttctctgatacaccatgatcaactggttcacaaaataagaactctgaatcacccaactgaattttcctggtggacagattttccagatttctaaaaaatgggtgtttgagcataaagtagctggtatcctctgtattgtcattaacgctgacacagaaattcacaaggaataacaacatccagaattttctgtgcaggctatttatataccaaagccagagcagttataggagttctgttattcacccaggatgatatcccaattcgttcattcactcatcctgcaaaggttgcctggccctgctcaggctgacatgcccccacctccagatgtcgagctgcttcataatcaccaagcagtggcatctcacgccatcccattagagagtagcatgcagcccacttgttgggcatgttgatgcaagcttaggaaggaaaacataattcatttttgccagtgacagaaatgttaacacttacttgaaatagctgataatctgacaaggagagctaaaggattactgtatttcatgtggctaatgagaaaagctgtttaaaagccatatgaaaaagacttaatgtatggtgagtgagcattgctttaatgtattatgtgccatcaactattagaatgattttcccctcttctgttgccatagatttttgcctcttttctctgggaagagataatagaagcagcatccattcaacagagactttccaagaaacattcattcaataagtatttcttgagcacctactgtgcaccagtcaccacactaggcatttgggattcaaggtctcagacctctcagcaggggctttttatggaaagaattgataggggaagacagtagacaaaagatattgaaaaatcatgtttgggatttagttgatatatgaaataatcttatttaactttcatttactagatgaggaaactgaggcctagaaaaccaagtaatttgtggagggggcatggctaattagtgggaaaccctggcctggatccatgatgttttgcttctctttttgatgctggagcagagtctcctgcagtcacaagaaagaactatggaacgatgtgtttgcagcagggcaggaagccccgttaagtaaaatcccacggggctccagggtccctcagcatccacagggggcactcgagtccatgacaaagatgccttcagttctgtccacactacgcaagaacaggctgcttcaccctcttgcactggagggctgccctcttcctggtggtttgtccttgcccagtgcccctccttgctatccagggcactttcagcacagaagacattatcaggaaacagctacattcccccacccccaccgtcaccagtcagcgaaattagtgtttctacagctgaaataatcaggtctaaagccaaacacctttctttatttcttctttcttctctctctctctctctctctctctttctttctcttccttaccttttagcgtgtgcctcatattcaaggtaccaggtaccattcctccttctcaggacttggagctccctatctccctgagacactgtgatccaaaagcaacatgactccattctcagataagacagcaaaacttctccccaaacccttgggatccttacccccggcaatggcagggttgagtgttcctttgccaaaagattactattgcaggggtcaaaactgacaagggagcccagaaactaatgcaaatggttaggggctcccccttctgcctgccctaatttctaggtgagtgtggcccactttggtgacaacaaggagcgggaagcaattggcgtggttaatgcattacagccacctcaaatcacggttctttcatacagaggtgatcacaagcagtggccacacaggttaagccatatggatctacagacacctcatttacttttactacaatgtcagaaattcctgagattatgggctcagtaaattgatctaaataattcaaggctattattccataattctattctttacctgctgcatgaactaaattcttcttttcatcctcccctaaattggacctaaccatcctctaaattgtacattaaaaaccatgtgtttttccacccttagtttttgtttgctgcatttacaaaaggcattctttgctgtaatttcactgacataaggagtttcactacctccaccactccatgtatctggcacagcttccttttggatcagctttgcccttggctcagctttgcccttggctcacctcactcttgaggtcccaaaatggcaaacacactcgtgtctcccactcattgctttgtctgtcgcacccactgcctcacctaaattcactaacttagcatatcatgtttctataaaacaaattaatacatttccctcctcccacaaaagaggtttacttctaatcaatcttaagaaacactactaatcttaacactattagtaatactaataaaatctctatcacttatgatgtacttaccatgggccaggcttgggctaaatgctttatatgtattaccatggttaattctcacaataatccaatgtggtaggtattatttttattatttttatttcacaaatgagggtcaatgaggttgggtaaattatccaaagttattccagttataattatttatgccaatcttcaaatctaggtccttgtgactcaaagcccactggtttattagtccctcctagctcaacctctaatttgttctcctggagcactgcagagaagtcaaaacacaattctgaatgacgagccctggtcattaaccctgattctcagaagttgtcatcttccggattctgcagtctctgtgcctttgcagactgccttcctgggaaagggaaggtttagttctcagaatttttattccaattaagtaaagccatggttgtgtcttttagaaactgaaaaacaaaacaaaattctatctatggtagttggatgaaccagctaaactgaaggtacattttgtcctgaaaagagagggtagagttggtgttagaagactttcattcatttaccagatccaacattgagtatttttgtgatcttgatctttctgacttcagtttcctcatctgtggaaggggagaatatcacccttcttccagaatccttgggaggattcaagaagctcctgcttgagaaggctctgggcacagtgcctggcatgtcatctgccgatgttcttgtgggctgtgtttgagtcttaatttatttgaatatccctgagatatctatgtaggagcaagtaaaatctgaaatcagatcctgatctctttacatgttcttccttaggcttcattagttaataaaatgttacatttatcagcattcttttcacccctacatctgtattacatgcatatcacaaagtatgtggaaaaaaaaatgtttcccttccttatcctttgggtcttctctttcaattaacctctgtttcaaaatactggaagctaaatatgaataaaaaatagaaagtttgccaaactagaactccggtcagtgttcaggaaccaaaatcttgctttattgatacctacagaaaattcctgggatattcacagctattctcagtgcttgctacatcacagaaatgcctgtgatcctctgaccttttgatcaattgctcgcctattatctaacatcttctgctaagtgaagagcagggtatccctaagagtaggtgttaattattattattattatttttttttttgagacagagtctggctctgtcgcccaggctggagtgcagtggcgcgatctcggctcactacaagctccgactcccaggttcacgccattctcctgcctcagcctcccgagtagctaggactacaggcgcctgccaccatgcccggctaattttttgtatttttagtagagacggggtttcaccatgttagccaggatggtctcgatctcctgaccttgtgatcctcccgccttggcctcccaaagtgctgggattactggcatgagccaccgcacccggccagggtgttaattattaatatgtattaatacattgcattaccctttcattggagtgtttaaaagtgggggcaggggagttgttgctttaaggggagttacgcttttttttttgtcctttttttttttttttttttcctttttctggagaacgaggtctcgctatattgcccaggcaggtctcgaactcctgggctcaagctgtcctcccgcctcttgcctccctgagagctgggattacaggcgtgagccaccgtgcccggccaggcttttggatctagtcaagttttatgaattgtccatttgaataagaatggcatttttcaataaatcattgcagcctggatgagtttaccccatgcaccctccagtcaattgcccaggaaagagaaatgcctgagtggagatataatgtttttcttcatttcaaatatattccatttattttttctaaaaacagcactcaagttttgctggaagttctgccgagctcagcccatccatgtggatcaattaaacaagttgattcttcctctgtcctcagaggtgggcatttgacccagaactagccaattagcatgcagcattccactggttcagtgatgggcatgtgacccaatcagaaccaatcagaactaatcccaagacctccccctgagcttgttcctcatctgagagacagagatggagagagggggagagagggagagagagagagagaaagagagagagagatagagagagagagagagagagagtgtgtgtgtgtgtgtgtgtgtgtgtgtgtgtgtgtgtgtgtgtgtgtgtgaagggatgttggcagagggggacacgttttatgtgggcccatgttagaaagattgggagggaagaaaataatgagcatgatcttttccttaaaatcatgaagaatgggtgttttaaagagacaaatatgccgatcaaggcctgtgttctttctcctcgccaaactggcttcagacctgtgtggaatttaggcaatggtgcccttccaatggcaacaataggaaatttggtgttagcaggtgcacttcccttcattgataaaaatcctttggaattaggtaattcaaaattaccttgagatgtaactttgaatttagaaagatagaattgaaagaaaaagtgatggataatttctggtgaaatgaatgggcctatgaaatatgtatttctcttcccaacttgcatcaacttatttggtatttcagtttgtgtaatagttaaaactcctggcagagcagaggcagtaattgcaaacagctgtaaagtattactcatcttgctgatcaaaatgacttcccactaaataaaccatgaaaaaagcttttccacccacagagaagtgaagtgtaaatgatataaagactctaccatgaagagatcaacagattgcattttcttataactgtggttttctatagctacagttaccttcaaaaatggcttataaactcagctagttcaggaaaaagaacttgaataataacattaagatggcagtggggatcctgggaagtgtttgaagttacaaagcttttggagagccaccttggttcccttcttaggctttccaatggatgaaaacaacttgcaatgtggtcttattcttgcttgttttggatatcactccaggtctcttgcccttcgtatctgagaaccattagctggacatccatgtcttggtctttctatcatggttttgaagggtgatggagccatggtggtggcgtcaatatgttgatgctactgccatgggcatctgactgtgagcttcaggtactgataaaagaataatctggtgctggagtcacagagctgacctctgatgtcactccagctacttgcccacactacattggcagctccttgtgattcttctaaactaggaaattcactgggcagtattcaccaaaaaccaataaaaatttctcttcacactcagacataaatctctctcctctacctatctcttttccctaaatcaagactcatctataagttgatactaagcctatcatttcagtcttactgcttttttcatttttagttgaaatgtaattgtacatatttatgggatacagagtgacatttcaatatatgtatacaatatatgtatttctatatatgtaatgatcaaatcagggtaactaacatatccatcacatcaaacacttatcatttctttgagttgtaaacattcaaaatactctttcttagcttttttaaaatatccaataaattactgctaaccatatttaccctacagtgctgtagacactagaactcattcctcctatctagctgtaagttcgtatttgttaaccaacctctccctgtcgtctcctccctgttgcttgccccagcctgtaataaccacagttctactctccacttccatgagctcagtttgtttttttttagctcccacatatgagtgagaacgtgcaagatttacaattctgtacctagcttatttcacttaacatagtcttccaggcttacccatgtttcagccaagaacaggatttcattatttttatggctaaatagtactccattgtaaatatatactacattttaaatctatttatctgtttttggacatttaggttgattctaatcttggctaccgtgaatagtgctgctataaacatgagggtgctggtatctcctaaatatgctgatttcctttcctgtagataaatgccccatagtgggagtgctggaaaaaaaaattctttttctttaaacctgatcatgtctgtcctcataaatgcatgttacacccatctctcaccatcaatgcaaccccaccccgagcagttgttcactcttctcttcccttgttctctgcacaccatgtgcctccataccccagcctcaggcctttctataccattttctatttggggcacatagtttttattcaactttcatgctgtcttttgagaatctacaatgtggtttggatatggcactttttatcaggatgccacatcagagttgataaattcaaagtaatatcgttctttttcctgccaaagtcagctcctcctttccactgcactttcctgccagtgccaccacactttctcctgttgtgtagggagaacacaggtcacctccctaacatgaaaaggtgctcaataaagatgtgttgaatatatgaatgagtgttcttagaggacacccttgtacctggactggtccttacatgggtgtaagttttattctctaaaaggggtgagtgagagtttatgctaagattgtaagcaaccctcagggcagactctggatgtatattacagaactgctgaacttgtggaatgtgcatatttatactgaaaatatttaatgccatatgtgtaagacttttgctaactggaatctgaacatcaacagctttgaagggcttattctaccttctcagcacaaaaatactttttatgaatgcacatatttatgtgcaaaagtataaaaaattgactttaaaatatacaacaaattcattttagcaattggccctggggacctagaaggagaatgagattggggtggtaggggtggaatattagttaataatgctttatgttattgaaaataattactgaaaaccaatacaataaaatattaacatgttaattgagtatagtgcttatattcttctttacatgttttaatatctttacaattcctttttttgcttttgttaaggaagtcacagttatttggcagtatgtctataatggtacatgaaataatgtctgatttctaaacattgacatcctacattagatgaaatacattaagcattaagctttgatattacactacaaaattaattgaagaaagccacccctgtttctttcttttctttttatggttattatgtgccccatatgatgtgcaggagttttttttctaggctttgattgttttaaataaaatcagaatttgttaaagttcagttaacactcagctgtgaaccctaaggtactggggtctttttcaatgggagatctttaagcattattccaaactattctatgctaattgatctattgataatttataatttattattaaatacattcaatttcttaaaaagaaaaagcaaagaaacaaagggaaacatttattacaatttaaataaaggaattagcagttgaaaacaagaaaacctattctgagcatccgtacttcttggcaaccaaaacaatcaatgaaatcaatgcattgagttaaacagttcccaattttccactatgttacctggagaaaaaaaccccagtatcatagggttaaactttgggaaggatttttcataagaatcttaatataaaggttcttgaatgacataatgtacaaggtctttgatagcaatgcgccccacagtgcaaagatgttttactagtcctgttggtgtctcaaattggttctcggtaagtaatctggacatactgtgaaattataattctgtgtagacaattcaacttaaggagttagagtgatgcaatccaaatagatggctttcttctgatctggcttaacagaaatcttgaaaaatctgggagtaaatgttgaatatatcctcagttctcaaccactcttcttctctgagagacaacatcacaggcaggacatcctcccaagggtacacacaatattatgtacagttcccacacgagaaacacatcataatcttagtgacaatgatgttctcataaggtcagttatactcagtgtgcatagttgtccaagtgtgagtatgaaaccaagttattcgcaagtaccactactctgattattagtaataacaatccacttgtgacatagcttttctttgctgaaacaaaatattgttttgacatcatggtcaaaacattggtcttaggcaaatgctctctattatctattgttgccaagcctttgagaagtgttttatgtggggcaaaaggtcccttcctgtctctttggtcaaagcaaaggaggagtacagatgactgagagagtgatcacgctgctgtgcccacctatgaggtagaccttgttcctggattgggagatgttttgtgctgagggtgcagtagaaagagcacacagctagcagtaaagagaggtgaccttgactgcagctctgcctctgacttcctgagtaacctcagactagtcatgcagtgcctgctcccacatttctttttgtaagctgcaagggctgaatcagacaacagcctctaagtttcttctgagctctcatactcagggatgccaatgatgttggcaggatgagctacatagtttgtaggacccagtgaaaaatgaaagtacaaggcttcttgttcaaaaattaagcatttcaagatgcaacagcagatcattgtaaaccatgtgcacaatgcttctgagaccagggctctctgcaactgcccagttatagcctttgaagataggatggtgtcagcttcccattacgaagctgatttgtcactcagggctcagacgttggatcttccaggctgaaagtgggaggagaacacatgttgttctagtcacagccagagataacacaaagacagcctaacaagggcccaggcacaacacacattgttataaagaagagaagagggtcacctagtgactcaacacaaaaatgatcctctgtccacatctcctctccaggtttcagtcatggtaaggactgtcccaggtttcagagccttcaaagaagatcttaactctgaaacctgtgcaaagtctggggatagcaggttgtgtaccacctcactttcctgtctctttctctctgaataaacatcttttatcaggaagcccagcagaacacagtcaagaagcagataggtgactgctattcccctcttgctgaaaacgcagccacttggagtcagcttgatggcagtggtggctcaggccttgaacacgtgagaatagactatgttgtcaagatgctgatgaaccgcacttctgcctgacttggtgcgttgtctcaggtctcagcactcacaatggatgctcataatcctacacacaatccccaaatgtcaatgaggatcattggccaaccatacctcagtgcatggggggtagtagggttatccattaaggccccaccttccacctcacaaatacttctgatcagagggatgagcttgggtaattttgggatgcatgacaggatgatgtcagcagactggccaaatccacattcagtatttcccatcatgaggtctttggtgtcaggtgacattaaagaatgagagtggtgaagaaacacctctggtgaaccactttccaataggctgagaatgcagctttcaaatcacttccattacttggcataaagaaactggaaagctaagtgaaagagagaacacagggctgaaggtcagaggacctgagatcctgctctcaattcccacttacagactgaatgacaaaaggtaagtcatttgtcctcctgtattgctgctttcctattgaaaaacagcaataaactacttccttcatggagacactatgaccagaaaatgaggcaacctataaagcacacatttaaatataaaatcactgctgggcatggtggctcacgcctgtaatcccagcactttaggaggctgaggcgagtggatcacctgaggtcaagaatttgagaccagcctggccaacatgatgaaaccccgtctctactaaaaacacaaaaaattagctgggcatggtggtgggtgcctgtaatcccaggtactcaggaggctgaggcaggagaatcgcttgaacctgggaggcagaggttgcagtgagccaagatcctgccactccactccagcctgggtgacagagcaagactccatctcaaaataaataaatacaaataaaatcactctgcaactagtgggtacaacttgagtttcttttttttttctctctgtctgttgcccaggccatcatgcacgctggtgcaatctcggctcactgcaacctccacctcacaggttcaagtgattctcctgcctcagcctcctgagtagataggattacaggggcccaccaccacgcctggctaatttttgtatttgttgtagagacagagtttcaccatgttggccaggctgatcttgaattcctgacctcaagtgttccgcccacctcagcttcccaaaggactgggattacaggtgtgagccaccatacccggcccaacctgagtttcttaaaacctcataggcctcatggattcaataaaataagtcatgattatgataataatttttagaggttcctgtaaggtagaaactgctgttatttcaacttcccaaaatgccttgtggggccctaaggctatctgtataatctagaaatagatatatattcaaattagctatgtcacatcaaaatttggagaagaagtaaaaaaaagaaatttaagagatttactccaccaatctcttggtaatttttgtgttcattatcagtaagctgtgtgcatccttttagagtgctactgtttgagaaaagcagcattgaagttgctgctgatcttggtcatgcattttcagagtgtgcttatcagcagacttggatgctgttggggttctgtttttgatttgcaatttttccaagacaggctttctgttgcccaagctggagtgggtagctgctgtttctcaatagacaagtcctagaagtagagataattcaattttcattcactcttagctcttctgccactggtgttcctctttgaccccgacagggctgcacctgtcttccaggcctgatgtagcacttgtatggtttgccacttgccagaagatccacaagccattctaaaagccttttgcccagtagagaccactccagtgagcacaaattgtctaatggctttttttagacggtcttcctccttagctcatttttctcccagaacaaagatatcaaggtgttgatttagcagcggttcctgaaggacaatccagcttggttgaaatcttttcattataatagaaaatataatagcaacagtagcatcccctgttacactgaaattaaatgactactctttcactgttggggtggcaagtataatttctatcacttctttggaaagcaatacaacttactaaagatcaccaaaatgtttatactttttggaaccaaaaacctcactgaaaaaaattattccaagagtatatttcaacagaaaaaaaaaacaagtaatatacatgcgtatgtttctccctgtgaaaacaacaacacagaatttattaaacaagttttgaaacacttggctatgtggtaacatggaacaatgttctcctataacgttaaaggataaaagcttagagaatagaatatattctatgactgcaactatgaaagaaaacatagatctacatagggacaaaggtgataaacatgcaaaaacaggtgtttgattcatggattatgtgtatttttcctgcattcaaatttatctttattattgcttttttatgttcccccttcctccccccaaaaaatcctaaagatcttgaatatgcccctatcggtatttaacatttcatctgaaactgggtctagatgactcaatctgctccagttttttgaacaagatgaatagcaaggttattctttccattgttttttttttttcttttcttaacagccagacacaggtctttaattatacagctggcttctttgtttgggatacgttactttcaatcattttcctgatcctctgcatgatttacagaagctgagtgggaggctttagcatttccatggtcctccttctccactatcatgagattcttatgtgaattttttttagagccattattctccatttgcaaaggcagaatgcagtggcaggagctgggactctgggaaaccaacggccaagaattcaaactacagcatactatgaaacactcagataagatgtccccatcatattctatcactgggcaaagtaaaatgtaaaccacgtactcaaaacagaaaatattgtgggtgacagtgacatgggtattcagaaagaagaagaaatgcaattaagaaaccaggcaaagaagtaaacatgccatgtagcttacgaaagaccagccacattgtgtgtattttaatattgtttaatggtaacacctaatagagcatcatgattgtgtgaactaaattttcagtcataatgaatgctacaaacttcacttcccaagtttaaatacgctacaacgtcttgggaaaaatgcaagaagaattatttgataaatgtttctcttccagcctatcttgatcaacagccagcagcaacacattgcagatacaatctcaagaccttgtggcatgcatttgtcactacatgcgtaacttactatggacagaggatcacagaaattttgaatataatttcccacatgacaggaggttaaatagaccacactggaagaaggcaagaagcagctagttctctggagtaccaaaaagtaaacttcagccagttctggaagcagataaatagcaggaaatatactttcacatgggctactttctcaatagttcttgcttgcaagagctctagggaaagtatgagttactgggtaacaatgtaatagaaaaggggccagccttgggaaaaattgcagtggaagaaaatcagtgtctcctcatttacatctttctttctcctcttcctttgtaatgctgcctttcttggggtattctttcccctagaataccctgcctgtcaccccacaacaacctgctcttgagactgcatttctaatacctataatgagatgttatgtcaatgcctcatctctcagtgtgtgtatagacatattaagctttctctctatgctgtgttttctcatgcaggaatatcagacattaatgaaccagtaaagaggatgctggggtgcagaagagctttcccagtgtcccgggagccattctacacagcatcctacagcatgactatggatctgctgtgcttagtttctttacttgtgaaaacagagtaatagtagcacctacctcacaggattgttctgaagattagaggggttttttcatggaaagctctagagcagtgcttgagacatggtaagtgctcaacatgtgttcattattagtatcattatcaatatttgatgtaaaagcctttctgaaagaaatcacacaagaacatgatcagttaaaaaatacatatgaatgaaagtatgtttggtgctgacacaacacagactggcataatggttaggaacatagagtttggaagtcaaccatctgtgctcaaagcctagtgtcaccacatggccattgtgggacactgggcctcagatttctgtggggaaaagaaagagaggtcagattgttactgtgtctgtgtagaaagaagtagacataggagactccattttgttctgtactaagaaaaattcttctgccttgagatgctgttaatctgacaccctacccccaaccccgtgctctctgaaacatgtgctgtgtccactcagggttaaatggattaagggctgtgcaagatgggctttgttaaacagatgcttgaaggcagcatgctcgttaagagtcatcaccactccctaatctcaagtacccagggacacaaacactgcggaaggctgcagggacctctgcctaggaaagccagatattgtccaaggtttctccccgtgtgatagtctgaaatatggccttgtggggagggaaaggccctgaccgtcccccagctcgacacccataaagggtctgtgctgaggaggattagcaaaagaggaaggaatgcctctttgcagttgagacaagaggaaggcatctgtctcctgcccatccctgggcaatggaatgtctcggtataaaacctgattgtatgttccatctactgagataggggaaaactgccttagggctggaggtaggacatacgggcaacaatactgctctgtaaggcattgagatgtttatgtgtatgcatatctaaagcacagcacttaattctttaccttggctatgatgcagagacctttgttcacgtgtttatctgctgaccttctctccactattatcctgtgaccctgccacaaccctctctctgagaaacacccaagaatgatcaataaatactaagagaactcagaggctggcaggatcctccgcatgctgaacgctggtcccctgggcccccttatttctttctctatactttgtctctgtgtctttttcttttccaagtctctcattccacctaacgagaaacacccacaggtgtggaggggcaacccaccccttcagatttctagcctgaaaaatggaggaacaatgtctgtcatataaagttgctgtaaatataaaaccagctaagaaatgtaaaatactcaacagtgtctgacacaaaataaacacccaattaatggtagcagcaagaaaagagctctcttcaaccaacatcttaccttcagaaattggttaagaagaaatgagtgcttgggaaccttcctgttagagctggggaacacaaataaccccaagatatgacccaactgggaaatgaggcaccagagtcagcaggtctcaggactcgagaacatgtcatagatctggggccaaggggacttcccaataccccagtcctgaattagccagatgtgcctttcagtccttggctgagctggactgaggcctcctccaaagggagaaataaatgtgcatcctgaagagagctgactctgaaagagagagaaacccacagaggctgagtttcaccagcacaactacttccaagcacattcctcaggtaagtcatttctcttcccaaggggaggattgaatgagtttatggtgagaggctgaaagcttttctcctttattttccctcatgggagaggagtggaagtactatgttctctgtgggaatctgcagactatggacgtttcccccaacagttggcattgactgatttatctgcatgtctctctatccacatcttctatatgaagaatctaagtgggaatagcctccaaagtactctgatagtaccaaagcactattctagttttgtataatttttaagtctcttctttaaattttttttttgcagactccatcctagacacagcataccagagtctccaaagggctaagctcaagaatctattctgaagctcccaacaggagtcttatatagccaggcaggcaatgatcatatttggggaccattagaaataatcgaatgcatatactctgaacttcaaatttttaatattctcgttttctgctcagtaagctcaatttcaatgcagttcacagtttctcatatccaccatggcattctgccaaggaactacaacttgtattctctaaacccaactgttctaagaatgctgggctgcttatcaacttctaatgtaccttgcttaaactttcctctctcgatgtgtccctgactgaactgcagaagacagaacaactgtactagccatctctttctgcatatcccatgtctccacagaggccacggtgtcttcacaaagctaactgcaacgattttcgcaggtgatattttcccttcatgattttccattttctacttgagcattaaaatatcaggaagaaaaagaagatataaccatatagcagttggtaaaataagatatctgccccagcacagcccatactaagtattcagaatttacagttatattagataactacaaattagataactattaacatagttatattagataagtaatattttctcatcttcaagaactaaaaaattaacttttaagtgatattcaaaaaaggaagatactcactcacatcaacccaattaaaaccacattttctatagctggatgtaacaatcttaatccaaatcattcacaaaagttgtttaacattcttttttttttaaattatactttaagttttagggtacatgtgcacaatgtgcaggttagttacatatgtatacatgtgccatgctggtgtgctgcacccattaactcgtcatttagcattaggtatatctcctaatgctatccctccctgctccccccaccccacaacagtccccagagtgtgatgttccccttcctgtgtccatgtgttctcattgttcaattcccatctgtgagtgagaacatgcggtgtttggttttttgtccttgtgatagtttactgagaatgatgatttccaatttcatccatgtccctacaaaggacatgaacttatcattttttatggctgcatggtattccatggtgtatatgggccacattttcttaatccagtctatcattgttggacatttgggttggttccaagtctttgctactgtgaatagtgtcacaataaacatacgtgtgcatgtgtctttataacagcatgatttatagtcccttgggtatatacccagtaatgggatggctgggtcaaatggtatttctagttctagatccctgaggaatcgccacactgacttccacaatggttgaactagtttacagtcccaccaacagtgtaaaagtgttcctatttctccacatcctctcctgcacctgttgtttcctgactttttaatgattgccattctaactggtgtgagatggtatctcattgtggttttgatttgcgtttctgtgatggccagtgatgatgagcattttttcatgtgtcttttgtctgcataaatgtcttcttttgagaagtgtctgttcatatcctttgcccactttttgatggggttgtttgtttttttcttgtaaatttgtttgagttcattgttaactttcttaaagtaaggctctagacatttgcttctttacaagtatcttgcaaagccattatgaggtagaagaaaagtttaaatgcaccacatttttctactccatcgtaactaaaattactactcacaggatgtgtatagcttctgaattttggtccatcacattttccaccatcaaatgagtatacccttaaggttctcactttatcatcagcataatatattttgcttccagaatacccagtaaagctgaaattttttcatttaaagtgataaaaaaaattccccaaatatctacttaacaatcttagatctgagttttggcaagacagtttaatgcatacacaatgaaaacactacatttctcactctctctcacacatgcacagattaaaaccccaaagttttcactatatttcctctttcttatacagttcaatttttaacatgcagcttacttataatctaaaaacaattttaaacatgattgtcataaaaatattttaaaacagacatgaaatgtataaaggcagacatagatcatccatggttacatctgttacatttctttagaaacagaactgtttcttctcctgtaaacaaactttttttttcacacatttaaagcgaggtcagtgctgacataaaattatcgctctactcacagccttgtctagagccttactttaagaaagttaaagtttgcactgtgcttgagatacattttcttcatcttcacagccccagcactcttacttgagagtatgagtcaacagaagtttgcaggctaaaaccattcaataatattttcaccaatactggaatggtagtaagtaacattacaaaacatcagaggccaaaaatgtttctttgttggagcccaagattttaatttattcttcattacctgaaaatactgctcatttaacctctttgggaaaaaaaatattccagagatgaataattccttcattaatgcttcacccaagatgattccttcacacttatcctccaatgctttgctgttttcatcctttgatgtagcaggcaccaagaatcacctttcctttggtcatctggcataatgatctcttatggtttttgctagttgtttgacaaatattttgtaaatttttccacggtatgtatgcactgttttttgtagttccagttctaaaggttttattagggaatgaatgttgtcatcttaaaagaacaatttctcagtgcttcataaacagctctaaatgctggttgcttatcatcatggtaaacacctctgttccctgaagaatcaagattccttcttctgcttcttggcaactgcttccatatagacaatgatctggatgataattccattgacacggaaaggcaaaaagactttctggattatgaaaaaacatgatatccaacaaatcttgattgcccatgtaaatcttgattgcctatgtaatgtttagtttgtattctttaagccatgtcataagtatatctcttcattgtagtcacacagtttgtcatatcattcttgaaatacttccttctcattcgagtcatattcatcaacataattccagggtttactccagtttttccacagtatggttgcctagcaaagcgactataccatcttatttgaggttccttgtgttctgaggccactggagcaatttatgtggaattaaatttctttagtaaagaacaaatatgatcaactggtcgtaaaaaaggctattagtgtgggagtcaacttctttcaggaataacggcaagaacaatctctgcggaccacatggtttaaagagtttttccatgctgctgcattctcacttggaaaggttatggggtatattgtataattaaatatttgcagaaatgacccctgtcacgtcttcctttaaagctataatgtagctgatcttcagcaaaaacctggaattgaagagctttgatcctgaaaaatgatagctgacttcaacgtggtcatagtttcttccagtctttcatcacaggcaactacagctagatgcattttctcaacaggctgtattttcagacgacacctgtcccacccaccaggatgcacagcaggaccagcgctgcccgcgcctctcacggcaccgcatccgcctcctgccagccaggaagccactgaggcctgctgcttcccgccaccaccgcctgctgcttcctccagggacatggggagctggctgaaggcgtaaaggagcgagcagaagccgcaggccagacacagcgccaccacgtgcgggtagcgccgcatcgccccagccgtgttccttggtctccgtctccgccgcgcccgcctggtgaactggagcacagggaccatagttctggaaatttatcctttttctctccatggattcagcagcagtgtctaaaagaaaaaaattcatcaatcatttatgtatattttaatataaaggtaaaacactgcgaaccagtggaaccggatagaaagtaattcagttttacagaacacaactgtttttcaggctcttttattaaatataaaagagccatatatatttctgtggaattccccttttacttaagaattcattatcagcgaattagtttaaggaggctgttttgttagaggctgtggttgcattcaaaaattggaataggaacaatgacttgtaaaaattcaacattttattttatttttgagatggagtctcgctctgtcgcccaggctgtagtgcagtggcgcgatctcggctcactgcaacctcagcctcccgggtttaaggaattctctgcttcagcctcctgaatagctgggattacaggcgcatgccaccaagcccagctaattttttttgtatttttagtagagacgaagtttcaccaccttggccaggctggtcttgagctcctgacctcgtgatcagcccacctcagccttcaaaagtgctgggattataggcgtgagccgccgcgcccggccggaagttctttcttcttaaaaggattataaatgtaattcccactggcatgacacttttactaatataggttgactttttgcttcaaataacccattcgtacatctaaattaatttcgctcagtatgtgtgtgtgcatgtgtgtgtgtggatgtgtgtgtgtgtgtgtggatgtgtggatgtaaatcacagtaaagggtaaagggaaggtggaaaaaagggagatggtctaacatttttcacacattttttaaatacacaaaagatatgtagtaaaaacaatggtgtggcgaaaacaaaatcttgcaaactagaaaaaagacagtccccggtcccgtgtggtcccgtcccgccacggggccagccagctgtaagctccacgcagttcaacaaaggcccctcctacaggctcttggcggacgtccagaaccggttcctgtccaaatatgactcccagaaggaggtagagctccgcagctggatctagggactcactggcctctccatcggcccgacttccagaagggcctgaaggacgggattatcttatgcacactcatgaacaaactgcagccgggctcagtacccaaaaatcaaccgcttcagtgtagaactggtaccagctagaaagcctctccaacctcctcaaggccatggtcagctacagcatgaaccccgtggacctatttgagaccaacgacctgtttgagagtgggaacgtgaggcaggtgcaggtgtctcttctcgccctggcaaggaaggccaagactaaggggctgcagagcgaggtggacatcggtgaggagtactcagagaagcaggaggggaacttcgacgatgccaccatgaaggctggccagtgcatcatccggctgcagattaccaataaacgcgccagccagtcaggcacgactgtgtacggcagagcacgaggaggcatctctacgaccccaagaacaacatcctgccccccatggaccactcgaccatcagcctccagatgggtacaagcaagtgtgccagccaggtgggcatggcggctcctgggacccggtggcacatctacgacacgaagctgggaatcacaagtatgacaactcttccacgaccctgaagatgggctacacgctgggcaccaaccagagcagccaggtcttcagcctgggccgacagatatacgaccccaagtactgcctgggagcacagtggcccacggggctccctcaggtgcaggcgactgcccggggccagtggaggcccctgaatatctcccttactaccaagaggagaccagctactgaggctcccagcacgctctctccccacatggtctccctgtctgggtgtttgggtttttctgtgttttcatcttttttttttttaacctgttcagtgctgccagtcaacggagcgtctgtgagtagcagcgtgggatcaggcagcagggttttttttccccgttgctttcgttcctttgcaggactgagccaccgggctgtgggggaagggatcaaggccatatcccgatgcgtgtcgggtgagggtccccgctggcgcgtccaggctgtgggcctagctgtgctggggagacgagacctgggcatggagggaaccggtccccgaaggtttcccgttgcctcgcctcttcccccttttgtcagccgatcagtttgtggtttctgtacccgcaaaagtttcaagaagtattaacaaaagaaaaaaattttttttcccccaggaatggggcagggacagtgggtgctgggaaatcagtcccttgggacagggggccaggccaggatgctaaaatatctcaggctcctgagtggctggatttccctaggaccctcagaccaacagacctcagaccctcagacctacgctggggcccggtgaggaaacaggcccctacaaggtagtggaattctccgttgttagtgttaagcctgacccctctccatactagtccccttacccccgtggccctcagtagggtttttttgtttgtttttgtttttgtttttttgagatggagtctcactttgtctctcaggctgaagcacagtggagtaatctcgcctcactgcaccagcctcccatgctcaagcgatcctcctgcctcagcctccagagtagctaggactacaggcctgtgccaccacacctggctaattttttgtatttttagtagagacaggatttcaccatgttggccaggttgatctggaactcttgacctcatgtgatctgcctgtctcgtcctcccaaagtgttgggatggcaggtgtgagccaccacgcccagcccctcagtaggttttaaggagccccagccctccttctccccttctgggcctgaccaggtctactgctgtatctcccccaaccacacgccctgccaagtactgcacagggccccccacccagggaccccggatcatgagataatgtgaaataccgactgtggaccaaacacaataaaacctctgtttttaagaagaaaatgaaaagacttaaaattggcattttaggactttatatatattattaaatatatattaaatataaatgttatacaatttagcgcctttatctcccagtctctgggagaggttaggaacttaactttcttaagcctcaattagtaaatacatctggcctagccacattgatcaacctctctcctaacatcatcctgtaaatttcagaagctcatgcaaaactctcccaccttttgttacaacagatatgtcaactgatacaattatacaacaattgtataagataatattagatttaatctcacaatcacactcagctggattactaacccttctcctacatcttgctcacctaaatttatctacattttctatgaattgaatagcttagaaatgtatgtcatctgtgtattatagtgtaagttattgtaatacagaaatatggactttctttaactcccttttgctgcctaggaaataccaatttttttgagcatggcaagtgtttccaagcattcagaagtgcagaatgaggtctgcttgtcatcctctcagtctcagctcctctccctccttcatctctctgtttcattgatgagtatagaagatcagtgatttttatatgaaatgaaaactgatggaactaaggtgttgatttgattatccaaccgaccatttattgagtgtccattacaagttaaattgtgttctggagaacagctcaggaaatgaatgcttgacattgatgtacataatagaaatacaaacataccattaaaaaatcagacctcttatgacaatccagattctcaagtaagttttgtgaagctctttcaagatgagaatgtaaaatttcaaaaaaaaaaatcattttaacaagtccttcttgagacagaaaagtggaattagaagatcatatatggttgtttcactagctcaaatcttaagtacagtttttagtcaattgacagccatataattcttagttttgtatactgatattcattagaaattataaactttaaaaaatattcctgtctcattctactaatcaatttaaaattttcattcatttggttatatttcttcattttacctggtctttaatacttctttcctgcccagcattaaacttaattaatgtctaatttgcttacttggtttagttacttttggccatgttcaatacacttcttatgaagcaggcatgtaggagtgtttacaagtttatggttctcagtcttccaaatccctgatggcagcaccccaacagacacacaccacaatataaacacatacacacacacccgtgcacactcatactcacccacctacatgcagacacacacacacacccatactcacccacctacacacagaaacacacccacacacacacttcagtggataaacacagaaaacactctacaggcaaagacatcatacatcagggatctcttaatgcactacacacttctgtaaattatcaggactgctcaactgaggtgagtctacagagatttcaaaggctatttgagtgctaagctatctaactagtggttggagactatttaaatagtgcattaaacacaactcttgaggctctgaagaatttctgtgctttccaatgaaccaggagttacaaggtcctgaaaaccacaagcttgttatatactttaatagataaagcaaagctgatattaatgtgaatatactttatatttacttccattcatgttaatttttctttgcctgtaatatacatttttatataactggaaataaaaaacatcttaggaaaaagaaaacaaaaaataaaatttccctgattacactgtgccttggttcagtaaccctgcactgcacgtatagactataaatgggtgtcttggggagccactttggtatttcattttaatagctcagcctggagaatatatttgtgagtggatcacatattacaactgatttaaattttgacccatagagaaataagttttcaaaaatatatctgaagcctggatactgaaaaatatttatcatcatagaataataaaaggctagccattagttactcagaaattgttcaataactctaagaaaacttagacataaagagttatgagtgagtatagttcatcattaatgtttgtaaaaattaatggtgtcatttatgtttgggaataaaaaactagaaatataactttatttgatagagataaatgatagacataaagtttacataaagcaagagaataatactaggtgtgtaaaaatattgttttatagataagattttatgatgaaattgtgttgaacaacatgaatcaaacatgttttgcatactacatatgaagttacaacatcacagccttttaagtatttcattaacttcaaaatgtaacttatcgctgaaacaatctgatttaatgaattgggataatgggtaatgattggtgtaagctgaaagcaatactatacttttaaagttatatctctttgtgtattaatacaaacaccagagaagatggtcaataaattaattactgtacaatgtctatcataatacttaaacctggaagaaaatcattaaatgcttagtgaatagaattggtgaattgcttccattttatacaattttctgttcattttagggcttaccaaaacttacagctgtaaggcccaattatttactccttcaaataaagcaagattccaagaataagtgtgaatgttttgttttgtttttcactgaaatattccggtctgtagctactccaaatcacactaatctttctagagtctggtataggtcctggtctcaaggccactgttaccaccatcaccatcttttgtgcctcaaggttgagccgtcctaacttacctgcgtggaactggaaaagtcccatttcatgatactttaagcaacccagatgtctctttcactgaaagtggtattcttcctgtgttttttctttccagcaagtgatgtcgacctctacctacacctgacatctcagtgtaattcttgacattttcttcttcacatttccattttcagtcaccaagtgttgtcagattttaccttctctctttttcttgaatgaatttttctctttctgtcttcattgccatcatgaattccaccccatcactctctcacctgggctacagtgagcacctctaaagtgctctccctgattctctctccaaaaatgtttctgtgctatatccaaaatgacttacttgaaatgtaaatacaatttacattgtaaattgcttggcttaaaaattcccaaagacttcacattggtactaggagtccaatcaagagtcaaaaaatgggttcaagcagtacaaaatttgtttcttttctctctcccccatcttgtggcatgaacattattgagctaaatgattcagatatattttttcttgccttctggactttggtcttcttattcatatgcttttcccactaccatcccagatttacataattagctcttacttttattttagtttgctcttcatcttccccaccaagagaagccttacctgatatccctaaatatgaaaggctttcataacagtgcatagcttttctctgttatttataatattgttttcaaatttttatatttttgttactattaataataaataaatctgagcatgctctttgataagaagtctaataaaattttggtgcaattagtaattcagtacataattgttttctataagccatgattctagagattgaggggaaaatgcagcagtaatctctcccaagtggaaggacaaatagccaagcaatattgacctacccattcatctctcaaaaacagggttaagatattgattctcctgttttcaggatgaagaagggacagggagtttcttgctggttagtttctcaactcactctttttatggaaaaagtaattaatctgataaatgacacagaagattttgatgtttattagcaaggtggtgattccaagaagttgaaataaaaaggcttcagagcctgtctctctcaatcactatctttgggttcttgaggctgcttgtgcacaaaataggaagcacttgtgtaagagctgcataggcaggctcagtccagctactggtttcataaatccaacttttccaagcatgacagaatgtcagaatcccatgagccaaaacttttatgatgagagagaaagaatgatattttgctccccaatctaattttcaaattaaattttaaacaaagttaataaagttaaataaatataacaaagctgaatatacacacacatgcatacacccatgcacatgcacacaagcttcttgcatttatttttttaattgtttaatcattcatgagaaatggtttgattttgtattttctatctaccaatacttgcacaagctctggctgcaaaacttttgttggtcaaacattagcatttggggaacatgtccctgctgagagatagatcttgatacagccttaactacatcatcagtagacatgggactgtttttaactagagggaggcaaatggctttcagatggttgtgtagctggttttaacagtagcctgcagtggctttttgacagacatgaaccttactagttattattaggcttcagagcattagtatgaggttttaatttgcttatgttaggcacgagaaggtagcactatcctagatgccctaaatattgttccttgtcacttttttcccactgaattcagaggtaatttggggactgtgtctaaaatggtcttatattcatgtgccataggtttctgaagcttccattctgaacatggtctcaagttggctcttgagggctaatttcattacacatgatcataggtataaatttaaatttatgggggattgttttgtacatcccacagaacctggatttactacaaagagactgtagagtttatcaaaaagaagattaacaggaataagagttcttgctgtctagggaatatatcatcttctttgggtaatgcctattaatgctcctcaaaatagctagagcattcaaggtttgtaaccagttcacaatgacagaagtagcttctactagaaattaaatatattagttctttcattgagtaactattgctacaagaatatatttgctgaataaactaacatgcttattgacataattgatttgcataccatggcaacacttcatggaccaaaccctaagtcccatgaaaaattgaatagaattatttgacagttaagaatcattggaaaagcctggctctaggtctcaggaagcaatctggttgattatgtgttttcagtgtgtagtcataatacaactgtatatcagtagtgtacattagacactttatacactctacatatattttctcatttgatccttcaatacatgaataatataggaaatagacttgaatttaactgctccagtaaggtcaaagaccaaaaacctcattacaatgcctacattagagattcttcttccaattaaaataaagttaccaagggcaattgctcctgccataacgagaagacattggatgaacttaaaattttttttttgtttaaagccatcaaaacactatgggcctaaagttacaatgaactaaatttcagagaaaaataagcctttcctaggtgatcacagattagcagcggagtccatctctgaggacatttgctggatctggggccttgagtaggtagaaggacaagcctacaatgtggagaaacacctggaacattgggaataagcaaaataatctacagggaacttcaataggggctgaaaactagaaaatcatgtggtctcctagctcttacttattttcacttaagagacagggtctcattctgtcacccaggctatggtgcagtagagtgatcatggctcactgcagcctcaaactcctccctcaggtgatcctcctgcctcagcctctccagtagatagaactacaggtgcatagcatcatgcctagctaatttttattttttgtgtgtggacacaaaaacccactatgttgcccaggctggcctagaactcttggcctcaagtgttcttcctgccttgccccccaccctcaagcactgctattacaggtgtgagtcaccacatctggcctcccctagcatttagatactaaactgttggaaaaatgagtaaaagataaatataagtagcattttgagtattttcttcccatacacccatgggattgtttcgtgtatcttactacttcacataggagaccattcctccatccaactatgcaaactaagtctttaaaatttgatttttgccctacaataagctctatactaaagctcattacatgtgattttgacagtttctgtttttataccacagttgcaaaaaattaatcatattctttactacatgagacattattattattgtttcctaaaagtttctttctggttttacttattcaatttttttattctttatcccttgtcacagacaggcatgctaatgtgtttgatataagttctttactcttaaagaattcttacaagataagaaggttgttttctgagtgtgtgtatgtgtatatacaaaagtgtatacatttttcttaaagagtatcgtgccataaatctgattttatttctatttttgtcacagagcatcacatccttcatatattcccacactgctgtaggttatttttggttgtttattcccctgcagctgctgcatagttttggacaaaatgaatcaaccgcattttccctatccagtcttgcagtagaattcacactgatatcctgctactgaaatattcacttccttgtggtattcttatgaaaacactttttggtcatgtgtcacaatttggcagggtctacgttagtctgttactattgctatgaagacacacgcgatgctgggtaatttattcatttattttttaaaaaaagaggtttatcttggttcagggttctgcaggctgcacaggaagcaatggcgtctgctctgggtgaggcctcaagaagcttacaatcatggcagaaggtgaagggaagccagtgtgtcacatggtcagagagggagtaagagagagaagggggcagtcccaggctgtttttaacaatcagatctctcatgacctcactgataagaactcactcacaaggggatagtgctaaaccaagcttgtctaacctgcagtttgcaggctgaatgcaggtcaaacagctttgaatgtggcccaaaacaaatttgtcaactttgttaaaacataagagattttgtgtgtgtgtgcgtgtgtgtgtgtgtgtgtgtgtgtgtgtgtgtgtgtgtgtgtttagctcagcagctatttttagtgtattttatgtgtggcccaagaaaattattcttccgttgtggtccagggaagccaaaagttggacattcctgtgctaaactattcataagggatccaccccatgatccaatacctctcactgggccccacctccaacatgggggatcacatttcagcatgagatttggaggggacacacatacaaactatatcaggtatatgtgcccgtcattgagacaggttgtagagtatgcatactttcagatgggtcctgtcatgttattttctgaaatgtttaaaaccattgaatttcccatccattgcccataaaggttgttttcctcatatcctcatcacacaatgttacgtaggattcttatattttctaagcgagtggtgaaaatacagatctcattttattgtgcacatttgcatctgtcatattgttaataatgtattggaatttttcggcccatctttctattgagttgactatcttctttgttcatttgaaaatcaatcatattcactgtgccctaagcactgtcaacattttctactactctgtcacatgtctgataaccttgcatgccagcctttattgaaatgaatctttatgatttttatactccttccagagtttatgtatttaagtaaattttttggtttagtaaatcctttattaaattgtaacaacaggcccaaatctctgttttgttgggttcattcagatttagagttcagaaaactttttggtggataaattctttttatcataataaagaagggctatgataatgcaatatgattatttctgctaatgcttgttgttttatagcctactttgtttatgtggtcaggaggacaagacctgaatggccttggccaactcagctttctgtacctcctggttctcagaataattttagaatgttccgagaagacaatatcctgagataaggagaaactgtctgggacagtctgggctctgcccttgttgttcctagaacaggatattcctgcaactcttaaactcagagagccaagtagcacatggggagtgaaacctagggcagagcactcaggggttcctcagctgcagtacacagtggagcatgtgcagaggagactccatcaaccctgggcaacttttctgacctcaagggtcaggcttgccatagaacttaggcttttgctgattcttcctgctcctctgtgagtgataaatttggtttatctgacttactgtgtgagcattcttctgtttctggcagcttggtttatataaaaaaacctcttgctagacctatgaatctatgcaatgtggaagtgtcatagaggtaaataggaagcaacttaactgagttgaaaactaacatacacaacatggggccactgcaccaaggggcaaaatgagctggccaaaaaggccacatgtgacaatgccagccacactgtggaagaagaaggatgctgaaactcagagagatctgaagatcttatccaagccaacaggaggcagggaattccactgtactctgattcaagagtacaagcttcatctcagagaaaagcaatgcaatggcctcagcgatcagaccagagagaccctctgccacagagaaagcagagatccagagaacagcatgaagacaataggagacttgagactcactttcactttgccttgaggccacagaaagcccaaagcatctgaatatcttcttggaggcattttcctaaaatagagctattgaaacttgaagaaaaatgtgaatcaagaagctaaatttaaagatatgttattttctcctgcccttccccacaaattaaccacaggatgagtctagtgagataaagcatatcatttatacaaaatacagaagttacatatcctttatgtgagcagaaatatgttcaaattttactcaataaatgtattttgttttactactagaaatagtaattttcacttggtgattactttattttataattatttctatttaaatttgtattagcccactcctgggtatctacctagaggaaaataagtcatatgaaaagacatttgtacacacatttatagcagcacaatttgcagttgctaaaatgtggaaccaggttaaatgtctatcagccaatgagtggacaaagaaaatgtgttatagatacaccatggaactgctcagccctaaaaaggaatgaaataatgccatttgcagcaatctggatggagttagagatgattattctaagtgaagtaactcaggaataaaaaaacaaatattgtatgttctcacttataagtgggagctaagctatgagggtgtaaagacagaagaatgatataagggactctgggcactcggagggaaggttggggggttgagggatgaaagactacacattgggtacagtgtacacgactcgagtagtgcatacaccaaaatctcagaaaatcaccaccaaataacttttccatgtaaccagaaaccacttgtttcccaaaaactattgaaataaagtgatatgtatgaaaacaatgaatatgatagtcttgaggtacaacattcactgggtttcatatgggagaaaaacagctaaaatcaaacacatggatagacagtcagaacaatgtccatcatatacatagtaaaattaatacaactgcaaacatgcatgagtggagtccatttggaatagcctgcagtgaagatgtatgccttagggcccacataactcatgtttgggagaaaatgtataactttattcaatatgaaaatgtcttcagaaataactcagtccatgctgtgcagatgcagtcctgtactgtagagacaaagaataagaatcatcaaagtggaataacctctgcccctgctccaaattctggttcacacggcagtagtactactggagagaaaagccatacatgtcccaaatgtgggaaagcctttatttatctgtcatttcttgtgagacatatgaaaattcacactagaaagaaatcttatgaatatgacaaaagtggcaaaggctttagatattccctacaccttaataaacatttaagaaagaacattctggacaagccctatgaatgcaaggaatgtgggaaaaccttcagcaagcctcaaaacatgcacatataaggagtcatgctggaaagaaaccctataaatgtgacaaatgtggaaaagactttgcaaagtcatcagaattaaaagccaccttaagagatacaatagtgagaagccctgtgagtgaaaggtggaaaatcatcattaatttttcaccatactgaacatgtgaggaggacatactggaagggagctcaatgagttaacatgcatgagaacatctttcctgaactctcatatcttacagaagtgtgaaaagaaaccctgtgaaggtaaactctatggaaagcctttcattcatcttcattcatcttgagtagctatttgttctcacactggagagaagctatgaaagtaaggaacatgaaaaaagcctcagtgttgcctcagactcatagttcatacaagaactcacactgcagagactgcttatggaagtaaaaaatgtagaaaagacctctttaaacacttatccctcctgttacacatgaatccacactctggagggagactgcaatgggaataaatataagaaagctttcagttccagctcttcacttattaggcatgaatgagcaatagcaggactgaagcactgtaaatgttaacagttactgcaattatcattgtcttatatctcaattagaacccaaattcataattttatagtttttcttttcttaaaaaaatggtataaaatgacagatagctgtcttagccccctttctgctctgccaccttaatgttgctatgtagtagctttgttacaattcacttacatacccatggttttattttcaatgtgaagccctctttgagttccattcaatttagatttagaatttgtatgctccaggataccctttttttttgtcagtttgttttaattggtcacaatttgcctgcattatggtcacattatgtggctttaatggtactgatttggggtgcctattatgactttcattatggtctaatatggccatttctgtccatttccctgctatatccattattctcatcttcttcactaagggagcatagatttatcttttacaaggagcacagtttatatgtctttatttatttatccttattttattatttaatttataatttgtttttgaaaaatggtctgtctcccaggctggagtgcagtggcatgaacatagctcactgcagcctcctgggttcctgtgacctcccagctcagactcctgagtaggtagcacttcaggcataacaggtgtgcaccaccacagtcagattttgttttgttttgtttttgtagagactgggtttcattatgctgcctggactggtttcaagttcctgtgctcaggtgattctcccaccttggcctccaaaattgccagaattacaggcatgagccaccatgcctggccctgattaatgtctttaaatgagtttcccagtttttctcataactgcagtgagcagagcttatagtcttggccaatgtgaaatgcagaattcactggtttggatttctgaaaatctgtttggaaagggaagagttattgttccttttttcccttaatcatattccctttgctctctctgcttgctgctctctggaaataggatgaaatgccctgagtccagtttagcaccttgaagaccattggaatgatgctcccaacaacacaatcttcaatatacaagatttctcactccccaatggcatgttgggtatccatggctgccctggactatttctggacttgtttcataaaactaacccctagtagaactaagaaacaattttaggagagatacttataataaattaaatgataaacctaaaaatgaataaaacatattataaaaataaggagaatagacaaaatgggcttgcagatgctgactggccacacatccttggtgctcacccccatggatgcctcaccaactgtgacacttggagagctggcagccatcactcaagaaatcagaacacagtggcctctaccacagcatcagggaacaaaaactaagcctgtcagctctcaagaaacatacttatgtgtatgtatatatatatgacataaattcattcagttactttgagatatctcattgctaaacagataaaatgaattaaaactagtgcaaatttctggcaacagtacttcatctccccattatttatccagggcattgaaaattggcacacatcacagatccttaagtcattctctgaatcaggaggagaaaagaggagaacagagagagcttaccatatgtgccagtcactgggctgagtgctgtgcctaaaggatcccacttgatgcttgaaataaccctgcaagatcaaactaaaaactcatacacactcacacacacacactcacacatacacacacatgctcaagcacacactagaaactacagaagaaaacattgacaactaatagaagtatagtgctggctaagcacagtggctcatgcctgtaatctcagcactttaggccaggagttcaagacaagcctgggcaacatagcaagacaccatctctacaaaacattttcttagataaaaatcatttttaaaaagtggtataatgtctaagggctcagggaaacagtacccctatggctgtatggtaagcagcaggcaaggctacttgtcagaccaaggtggtagtgattccagggttcctttgcacacttatccaggagcctggctagctcagcactgcctgggtttactttataccttctacagctctaaagctctggcaggtgggacctaaccataagagaaattgctattacgcaggactctcttaactgcaagtgactgaaacctactcgatccaggagaacattgaattacttgactctaattactaaaaatatccttaagtagatgggcttctggctcagtgagatcaggggtcaaataatatcaaccaagactcattctgtcccttcatttcctgtgtcagctctgcttttcatgcaagctattttgagagaacagcaaaaatggccccataaattccatataatttacttccttgcaagtaactgtgccaataaaaagaaagcacctcattcccagcagtttcatcaaaagtgcagggatgacttccatcagcccagcttggttcacatgcctgtccctgaattaattaccctgctgattgcccagggtggccagcctcaccccaatcacatggactagtattgaaagagtggtcctcacatgaaaaaaaaatggaagaatagtggcagagaaatatgggagggagggcctcatctctatataaaaagtatgagcatatttgtgttcttttgtaaacttattgatatagtcactggggaaaaaaattgagaaaaacccacacacgactttctacatgcctctgtgctttgtattcaacactgagctgtgacaactgtaattattaaaacaaaactttgaaaggaagtaacaatttaggacaatggggacccttagctgatgcgacagtgagcagttcttcttttgtgtgcatgaagatgcaattcccaggagcccgcctggggtcttctagaacaagcatgtgggcacctactggctgcagttccacttttccttccctggactctcgggagaaacaagttctggattcagctgaactgagtttaagttcaggctctgtgactcactgggtaaatctcttgctctccttgagtcccatatcctcattggtaaaatggagaggtagagttattgttaggtttggaaggcaaggcgagggttaaagaaagacagagagacagttggtggcttcaacagcaacatctttattgccagcaaaaccctggggaggaggaaaccagcttagtgccagcaccaactgccactcacaggctggggtaatcatgggactgggagggagggatctgggtggtagagcttgctgcccagcaggatatggcaaggatgtccctgcagtcaggctgttgggcctttgcccaggaggacgcgataaggatgtttctgcagtcacgtggttaggaaggatgtttctcatggcccaagttcccatggaacgtttcactgtgatcagagtctgcaaaatggctggaggtttacaaaatggtacaggttagactaacagtaacatctcccaggtaagtggttctacaaagtaaacttcccttgagcatctacactgtaccagacatggtgctaggacccaggccacaggaggaacaggacagatgaggcccctgccatcctggtgctcacgtctgatgaagaaagctaacaggtcataagaccaggtcagatggtggtggtaatcaaagacattaccagagtgagatgagctagaaagaaactgaaggagctcttacaaacacagtgacaggtggagacccctccaaaaggtgacttttgagcagaaacctgagaaatgtggaggggactatggagaatgacaagcccctgaagcaaccccaggattgggagggcaaacccggcaccaggagggcaatggaatggcctgacctgtgcgtccttcatgcttcctttctcagtgatgcacaaacagaaacatggggcaatttcgtgcagggtccatggatgaaacaagaagcagccgcactgcagagctggagtggggataaaatctgacccaacagtaaagctagaagcaggtgctgcttaccactgaccacagtgcaggtcatgaagcataaccagaccatgaaggcacgtccagggccagaccagctggccgggctgccaacatcttagtagagatcccaggagatcagttgagctggttagggggagaaaaaaaaaaacaggaaagcttcagaaaattccagaggacccatgacacttaacatcaacttcccccaagtgggatctgtttgtcattgctggttctaaagagttggttccaccacccccacctgcccgttgcctaaccaggggaaaactcagggtggggtccacagaaacaatccctctggaaggggaaagggtgtttctcatccaaaaccaagggaaaacaccactcataaggagcagaggggcctgaagggagagacaggattctgctgctcatttggatatctgcttcccagcaggaaaggggaccacgcaggatacagtgtctaagtggaccctgtgctgtgggactaggggggctggtgctgactcactgttggaggtgagccactataggaggcttagaacccctccctgcagcctctccagtctaataaggggatggtagtgtggtcagtgggggcatccagatgcagtcaaagggcacagtgagtgatgtctcctctggcctcctctttcagctgcagattctccgagttactggaacagcttctccatggccccaccagcctggagggtggtgacagctcccagatgacgctaaccccagggccctgcgccatcacccctggttccccttggccctgcccacacctatgtaaacagctttttcttaatgacccttcagccgcttcgaggtccctgccagtacctgactgccacattccccaaagggaacaggctcctcagcccaggagctgaggtttctacaggcacagagaaaacactgtcccaactgttggaatggagtcgggagtggaaaaaagaacgttttttctcaatgcttagactcaccaattgtttcattttatcacatgaaggctgtgtggcattttgaagtagaattaataatctacataattacaaattatattcttaaaagaaggtgctcagtgccatgcctgacacatggtggaactccacgatgagatgtgtgagaagccagggtgccatggttacagacaaggactgcaggtacagactgcttgcttcaaacctggaccagcggtgtgaattttggcaactctctgtattgctctttgccactgttttttaatctaacaactagaagtaaaaacaaggttattgtaaaaattaaatgaattaaagtaagcagagtgcctacaacacccccaggcacacagtcagcactgagcatgtttttcattatactcttaaagaggtaagagtgagaacacaggtgccagccatgagcctgggtttctctggagaggcatcagagactctacttttaacatcctccattcattcatttgaccctggtaagggaggagtctcatgggatacaaacaagcatccaccttggggccagacttcccatggtcaaagttgaactccaccactgttcagctgggtgactttgggcaagtgacttcccctctctgatcctcatattcccttttgataaaaacagcacaatggcaggcctatggggattgaaggagctgacagaaaaatgtgtgccttagtataattttcctggaagtagatcctgaggcaaatattcaaatacaaaaattctatttggagataactctaggatagtaattcgactgccagttcttccttagggtgcgtatcccaggaaacaccagtagaggagtggggaactgagacaggaaaggaatgcagcagttaaagggaccttcatcaagaaagtttcccctgtggcagccaggactcagccctgccaggtacatctgcagagacagcacagaacatgtgcctcagagtcacccacccaaagcaagggagctggggtatttatccaccaatacccaccagtcactcctcagggatccttccaagggcatgattcctccagaatgtcctgcctgatctgcaagtgtcagaccaggggttgaggacagggaccctgacagtacctccagcaatgagcaggaacacagcctggtgtggagagtttcagtcagtgattccaactcatacacttacccacacaccacactccagccccaacaatgtgtatatgtacacacacatacatgcatacatgactgttacccactttgatcctggtgactccatgggatatacagtaaggcagaaatcagagggaagagcagaattaaggggagtgaaaatcttaagaagaaaatgcaaatttaggcagaaaatcaagggggaagaggagtgttctggacaccaaatgctggctgggtggcacctactctacacacactgtcactaattatccaagaagccttgtggggtagaagaaattcctcttaatttacagatgacagaaatgtagtccagaaaactgactttactaatgtctcagcaagctagtgggtgatagatatggactcccagatctttctgtccacagagcctataaattcttccttgttaggcaggctgcataccaggccctgcttctgggctctgctccttttcctgctaggcaatcgtggcagaattgacagaaatgttatcccccttcaccacctggagcagagccaatgagaggagctggggaacaggccatgaggccctgcacccaccattcaatgtcttcaggattgtggtccctcagaactcttgcaccacatgatggcatcactcctgggtgtcttctgaggttgcataggattcagtagaggccagtggctgtgctgtcatatcctaagaggcagccacgcaggcttgcgtctcttggctgcttcagcaccagaggttggacagcgcccatgcactgaggccctcgggagaatgggaggagggaaaggaagggcagaatggagtgatgtagtgtccatccaccatgtccctggatggagagacccacaccgggaccaccgctggtactcatgaagatgccagcctccatttatatgtcctcatctgacaactccttcccattttcatcctggagacaagacctctgaacacattagctctgagggcacctgagtgtaacctgagacagtccctgaagacttttcatccaagcaggatccctcccttgccatctccagacctgccccacaagctccctcccgggtctcctggctcttgttcactccttccaggcagccttctacagtcatctctaaaatatatctgactgtccctcctttatccagcaccttctatggctccccagagccctccagctcaagttcaagttctttgatcagacatttgatctcaagctgcattctacctcccaaattaagatactggagaagccaccttgcccagcacaagtgcatcactgaagtcccaagtcttgaacgtggccttggtcttgaggaagtcatgaacaccctggctagtgagggtgcagggctgctccaggatgatggtgtctaaagttgtgcacaaggtcacaggccctgcagaagcatcacccctcaggaatgggtagtacaggaagtccatgcacaggcagatctgctggtgccattacactatgagggcactgagctcaaatagggtggcaatatattcactgggattcctgcaaggtgaggctggggagaggaagcagctccataacacatatgaaaccctggaaacccttctcagccaaaatctcaggaccacattacacccagaaatgggtgccctctgagcacaattgtctctctgtctcccactctgagctccctcatggccccacatgccccagcctggcccagagcttgaagcccagtaactgttcagtccatggtgttgactgctccctgggacaggagagcgcttggtggctctgggactcctcctgtggaacccctgcatctgccttgggacctcccaattcccatgggaagcccccatggctctggattgccccacctgccctgggatcctccagccccataagacttacttgatgccttagacctcccagaacatgacatgtttctcagaatgtggctgatgtccagggccatctgtggatgtttctggggacttctagctgatttcctttatggtctgtagggcacggccaagaggagaaaccagcccaacctcagaatggacaaaaggctcactgccccaatggcaaccaccaaactgtcagcagtgcttctgaaaggaaaggtttcattctgcagaaagctccttgtttggcttctttctgacgccagggaggggtaccaatccctgcatacctgtggtgcctacgttaccatctctgcctaggatgtgcaatgggcccctgctctcactgcggggttgacgttacctccagctggagacctgggctcctgacaccgcctggcctctttgtccttctctggatgagggtggaaaggctgtacctggtatttccctaggtccttggtttccaccttctaaacatccagcaggagtgaccatgcccagcaccacacctgaagtgggactcccttgtggagcagccaagaaatctacagatggaagaatgctctggtgagataagccacaggggtccctggggaggatctggggccagaggattctggaggtttccagccttgggctctgtgggaactatgatctggagatatttttttcatttaggtcaccaagagacaacccctaacccctgagcaaggcatggtcaagctctggcatgagattctcttccagcaatgcaatgcttgcagagacaggtacaaaagctggtgaccaggcctgctgtcccccaggtaaggacagtgtgctacccaccctctgagaggtggtgccagtccacagcactgggtgcctgtacccctggctctgcagataccggtcatggaagtcccatggaggtcctcccctctccacattaccttcttgctgcttctagacttcttctagtcattaagcatgttgagccatttttctgtgcatccgatctgacatttttgctctcagatgaaacacgacaaagtaagctgagccaccaggattcctggagggaaccttggatgcttggtcttgggctccagggcactgatgggagggagccagggaagaacaaacactggggctgagcccctatgacccaatgggaacttgtggcctgtccttatggccccaagacaccctgtcctcaggccacaggcaccacgggctttggtcagatcccagcctcccagtagtgtcccggcactagtgggtgctgacccctgagccacaaccacagttctgggtttggggtatggtaaaaccaccccagggacagagttctggggccgggtttgggaggaaccaaggcacctcccagggatggtgtgtcactcctacttgccatgaaatgtgcacaaaggctgtcctcctgcccatcccatcctgctggacaggatggaggaagtgagggaacaggcagcgtggacagctagggtgcagggagaggcaggtgcatgctgggaggtcaggccctgtgagggctgtgggggcatcaggtggagtgggcttcaggtacaccctcagtgcaatgggcaggtctcaggccaggcttcctggaccccggctgggtgatgtggtcactccctgggggactactgtcagaccctggccacgcaccctgggcagcactgtcccatcccaggactggattttctgagtcctcagacaggaaaacactgcccaggcctgacagactgggaagacctcttaagtcctccatccctagaccagcctcccaacagcagggacagtctcctacctttaccttcagggcactgactgatccatctcactctaaggcaaccaaggcagagctgaggacctgtgccaggctggaagccagtcccctccctaaataggccttagggaagcctcatccctgtcccagtgcactgcaagtttcagcccaggagacacatagggaagggaggatggggcctccccactggctgaccctggaaaagcgggacctgggagaagagggagtgcagggctggcaggggattctccaggcccatggagagctcagtctgcaccatggggctgcccctcctgggctggaggctgtgccctctgcaggatctgaggaagtgcagtcctgagatgggacagtgctacccaggttgggtagccagagcctgacaatagtcccccagcaaatgaccacatcacccagccagggtccagggagcctgggccaagacctgcccagtgcactgacggtgcacctggagcccagtccacctgatgccccaacagccctcactgggtctgacctcccagcatgcacatgtctctccctgaaactcagctgcccaccctgcctgttccctggcctcctccatcctgtgcagcccatagactgtgaccatctctctggccactctggtacttcctttacttttgtcctgtcagaatccctgagcaagatctcccaggtccatccaaacacctgctttgtccacttttgactgggccattgaacaccactgggccatcccagctgtccacagggtcctcgataacatgcatttctcctgacatctccctgcagtgctcagcagcccccactgaacaggtccctgctgaccagatccagcatatcagatcctccctgaccacaccctcactgactagacccccatcaccaggcctcactaactagattcccgctgacaggcccacaatgaccaggactccactgatgaggaccttactgataagtcctcacttgtaaggcctcactgaccaggtccttactgacaaggcctcgctgatcaggttccaccgataatgaccccattgcctggtcccacagatgaagccccactgagcaggcctccagggaataggctgccagtgaccaggctcctactaaccacgcctgaggtgaccagatgcccctgactgggactctaatgagtatgccccactgaacaggcacgcactgctcagatccccgctgacctggtcaccccgtagaccagtgctacaaaagccaccactgatcaagtcctttctgaccaggcccccactgattaggttccattgaccagcctgccctgaccagggccccactgacaagcgcctctgctgactaggtcccatgtgaccaggcctccactgaatagcaccccttgacctggtcaccagtaacccagcccaatcagacaaggccacaactaagccccagctgacaaggtctccactgaccaagtcccacagcccaggttggcattgaccagacaccaaacatttgtctgccactaggaacccactcaccaagagctgcactactagatccctctaatgagaccctctctaggcagacacctgctgaccaccccccactaaataggcctcactgacaaagtcccaactgactaggtccactgagcaggcctacactgatcaggcccctcctaaccatatcagaaggccaagcggcaatgagatgtttcatatggcaggagtaggagcaagacagagagaggaaagaggtgtgacatcctgttagacaaccagatcacataagaactcaccatcaggacatcggcatcaagaaaactaaccaatggtgaaggattctccacccacaccaccgcccactgtttccaggcagaagcctcctgcagaagcagaacctcttaggaaacatccactatggcagtgcagaaggaaaatataggctttgagcccccacacaggaggccaccttcctccagactccaggttcataagcccaccaacagctcacaccctcagtatggaaaagctacaggcactcgacaccaacccagcccatgagagcagccatgggggcaacaccctgcaaagccagagatgcactgtcctagtagaggtttcccatgagcctctgcctctgcagcaagttactcccaccctcccaccaccctactgacgacctactcctccccacactactcctccttttccttccaccccaaccccctcccatccaagattaaatcacctcccacctggcacacctccgacattaaggatgacacgtgagttttacagggacacacagccaacccatattattctgaccctgataccccagaacctcatgtccttctcacagagcaaaacacaatcatgccttttcaaaagtttccaaaagtcttaactcattccaaatgtaaaaatttcaaagtctcatctgagacaaggttacaatcccttctgccaatgagtccctgaatttaaaagggatttcttttccttcaaggtacaataggcattgggtaagttttctcaatccaaagggaagaaattccccagaaaaataacacaaatgcaagtccaaaccccagcaggacagtattcattcaatacagtatctcacagctctgtaatcatcaagagaactcactatcatgcagacagcattaaggagacagtgttaaacaatttatgaagaatccaatccccaccctcatctttcacacccatccacaaaataatctccaccattctccccacacccctacctccaacacccactcttcgccatgattaaatcacctcccaccaggccccacctttaactttcaccatcacaattccatgagagtattggtagggacaaaaagtcaaatcatattattctgacatgggtcccccccaatctcatatccttgtcacactacaaaatacaatgatgccttctgtacagtcccccaaattcttaactcattccagcatttactgaaatgcccaaagcccagagtctcatctgaggcaagtctacagtcccttctgctcatgagccactgaattacatataaagcaagtttactacttccaaggtgcaatgattgtacaggcgttgggtaagcattcccagccaaaaggaaaaaaattgccagaaagaagcacaaaaaacagatggggcttacagaccccatgcaagtcaaaaacccagcaggccagtcattgaatcctacagctcccaaatcatattttctgaatctgtatcccacatctggagcacaggggtggatagctgggctcccaaggccttgggcagctcagcatctgtgactgtgcagggtctatcccccacaggtgacctcatgggctgggctggtgttgagtgcctgtggcttttccacactgagggtgccagcagttggcgggtctatgaatctggggtctggaaaatggtgcattcctgtgtgggcgctacaaccctatatgttccttctgtactgccctagtaaatgtttcccatgaggctctgcctcttggaaaagctgctgcctcaacacccaggttttcccatacatactctggagtctagacaaaggctcccaagcctctagttttgtgctctgtgcacctgctggcttagtactatgtggaagccaccaaggtttgaagcttgcacccctgaagcagtgatgcaagctgtacctgtgcatctttcagccgtgactggagctggagctggagctggagctgcagggatgcaggcagcagtgtcctgaggatgaacacagcaacgcgaccatgggactcacccaggaaagcattcttgggtcctagaactcggggcctgtgacagcaagctctgctgcaaaggtctctgaaatggcttcaagaccttttaaccttgtcttagctattagcactgggctccattttatgcaaatttctgaagccttcttgaattttcccactgaaaatcagctttgctttttgaccacttggccaggctgcaaattttccaaacttttaagtcctgcttctcatttaaatataactttcaacttgaggtcatttattcagtcacagagaagaccacaggctgttcaaaacagacaagacacctcttgcgctttgctgcctacttcatttcaccagatataccctaaattatcactctcaagttcaaagtttcagaggtctccagggcaggaacaccatccagccaagttctttgctaaggcaaaacaaaagtaaccttaactcctgttcccagtaagttgctcattttcatctgagaccttctaagtctggccttcactgtccatccttcagtcactcttttaattatagctatgtaacaagtctctatggtcaccgttttaatttaacacatctctacaatagtccaaattttccctcatctttctgtcttcttccaagccccccaaactgtgcagcatctggtcgttacccacgtctgaacctgcttctacattttcagctaccgttgtggcagcctggcaatgtggtaaaagaagaaaagtccattttcagggggaaaattcaagaagccttcagatatttgcatatagaagaagccaaatgctaatagtaaaaaaaaaaaagatgaagaaaccttgagggcatttcatagctccactctacagtacaaattttctgtagtattatttttaaaagaggtttaactggctcatgtttctgcaggctgtaaaggcagcaagtggcttctgcttctgggaggactcaggaagcctcccaatcataccaaaaggccaagtgacaatgagatgttccatatggcaggagtaagaagaagatacagagaagaaagaggtgccacacccggttatacaaccagatctcatgagaactcactatcagaagatcagcctcaggaagattaaccaatggtgaaggatccgcccgcaccacccctcgctgtttccaggcggaagcctcctgcagaggcagaacctcttggagaacctctaccagcgcagtgcagaaggaaaatatgagcttgtagcccccacacaggaggccaccatcctccagacaggagattgataaacccaccaacagcttgcactctctgcgtggaaaagctacaggcactcaacaccagcccagcccatgagagcagccatgggggctacaccctgcaaagccacaggtgcactgccctagtagagactttccatgagcctctgcctctgcagcaggctacttccccctcctactacccaccaccctatcaccaccctactaacaacgtactcctcaccctaccaaccccttttccttccacccccggcccccgaacatccatgattaaatcacctccagccaggccccacctccaatattaaggattacaattcacatgagttttggtaaagaaacacagccaaatcatattattctgaccctgatccccacagtctcatgtccttctcacagagaaaaatatattcatgccttttcaaaagtttccagaagtcttaactcattccaacattaactcaaatgtaaaaaaatcaacatctcatctgagacaagtctacagtaccttttgcctatgagtccctgaatttaaaaggatgttcttttctttcaaggtacaataatggtacaggctttgggtaagatttttcaatccaaagggaagaaatttcccaggaagaaaacacaaatgggaccacaggcccaatacaagtccaaaacccagaaggccagtatccattcaatcttacagctccaaaatcatgaagagaactcactatcacaaggacagcaataaggagagtgtttaatcatttgtgaagcatccgtcccccacccccaattttcactgctcacccgcaccataaatcccccagtctccctaagccccatcttccaacccccaccctccaccgtgattaaatcaccttcctccaggccccacctttaacattccgatgacaattccacatgagttttggtagagacacagagctgaattttattattctgtccctggctccccaaatctcatgtccttctcacattgcaaaatacaatgatgccttccctacagtcccccaaaatcttatatcattacagcatttatacaaatgttgaaagcttaaagtctcatcagacacaaggctacagtttcttaggcccatgagcctctgaaatataacgcaagttaactacttccaaggtacaatgcttgtacaggcattgggtaagcattcccagccaaaaggaagaacgttgccggaaaaaaacaaaacacagataggacttaccggccccatgaaactacaaacccagaaggccagtcattccatcctacagttccaaaatcaccctttttgaaaccttgtcccacatccagggcacaggggtgtgagggctgggcttccaaggccttgggcagcttggcacctgtggctttgcagggtttatgccccacagctggcctcatgggctcggctggtgttgagtgcctgtgacttttcctcactgagaatacaagttgttggggggtctatgaatctggggtctgcatgatggtggcctccagtgtgggggctccaaccccatgttttccttctgcactgccctagtagaagtttcatataaggctctgcctttttggggtgcttttgcctggacacccaggcatttccatacatcttccaaaatctatagagaggttccgaagcctctagtctcatgctccgtccgccagtggcttaacactatgaggaatttaccaaggcttctagccagcaccctctgtagcagtgacccaagctgtagctgtgcatctttcaatcatggctggagctggagctggagctggagatggagctggagatggagctgcagggatgcaggcagcagtgtcctgaggctccacacagagggggtcatggaactggcccaggaaactgttcttctctcctaggccccagggcctgtaacaacaagggctgctgcaaaggtctctgaaatgccttcaaggccttttccctattgtcttgtctattagcactgggctccttttcatgcaagtttccgaagccttcctcaattttccccctgaaaatcagcttttcttttggaccacatgaccaggccgcaaattttccaaacttttgagttctgtttctcatgtaatgtaagagttgggactcatttaatgtaagtctcatccagaggtcatttcctccatcccacataagagcacaggctgttcaatggaaacaggacaactcttgagctttgctgctcagttcattccaccagatactcagtaaatcatcaccctcaagttcaaagtttcacagatctccagggcgaggtcaccgtgcagccacgttctttgctaaggaaacaaaagtaactttgacttctgttcccagtaagtgcttcattttcatctcagaccttctaagtcgggctttcactgaccattttcctgtgagccttctgatcacaaatgtttaacaattctttacaaagatccaaactttcattcatcttcttgtcttcgaagccctccaaactcttccgacctctgtctgctactcccttctgaacctgcttctacattatcactatctttgccacagcctgacaatgtggtaaaggaaaacaagtccattttcagggggaaaattcatgaagccttcacatacttgaatgaaaagaagctgagtgctgattgccacgacaatgacatttaatagttccactttgcactactaattttctctatgatcataaagaaaagaggtttaattggctcatgattctgcaggctgtaaggaaacacagtggcttctgaatctgggaggactcaggatgcctcccaatcataccagaatgtccaggggcaatgagatgattcatgtggcaggagtaggcacaagacagagaggaaagagggccacaccctattatacaaccaaatcttatgtgaactcactattacaaggtcagcatcatgaagatggtgcttaaacattgatgaaggaacaaccacccacacccaactcccactgtttccaaacagaagcctgctgcacaggcagagcctcttggaaaacctgtactagggcagtgtggaaggaaaatatgagcttggagcccccacagagatggccaccaccctccagaccccagattcacagacccatcagcagctcacaccctctgtggaaaagctacaggtttttccaaacctcaacaccaacccagcccatgaaagcatctgcaggggctcaaccctgcaaagccacaggtggattgccctagtagaggttttccatgaggctttgcctcagcagcaggctactcccccttcctactacccccaaccctcccaccattctactgccagcctactcctccccaccccaaccaaccattttgtgataccctaccttgttttaacctgatcgactctcccttagctgagggagccaggcagactccatcttggctgtttcacttgcagccccttacacacatcccttcctcaaggacataacttgtgcaagctgactcccagcacatcaacgaatgcaattactgacaagatactgtggcaagctatatccacagttcccaggaattcaccccgttgatggtacctaaaacccccgcatttctgtccagttgatagcacccaaagcccccacatctatcaccttttgatggatttaaagtccctgcacctggaactgtttgttttcctgtagccatttacctttttaacttttttgcctgttttgcttctgtaagattgcttcaacgaggcctcccctcccctttctaaaccaaagtataaaagaaaatctagccccttcttccgggccgagagaattttgagcactagcgctctctcagtcgctggcaataaaggactcctgaagtcgtctcatggtttggcgtttctctacaactcactcggttacaacccttttccttccaccccccaacccacctccaatccatgattaaatcatcgcccccaggccccactttcaacattcggaattacaattccacctgaatttttttagggactcacagccaaaccatattattcttaccctgatatcccagaatctcatgtccttatcacagagcaaaatacaatcatgccttttcaaaagttccaatagccttaactaattccaagtgtaaaaagttcaaagtctcatctgagacaaggctactgccccttctgcctatgagtccctgaatttaaaagagatttcttttctttcaaggtacaatgatggtagaggtattgtgtaagctttctcaatccaaagggaagaaatttcccagaaaaataacacaaatgggcccacaggcccagtgcaagtccaaaacccagcaggacagtattcactcaatctcacagctcaaaaatcattaagagaactcatcgtcatgcggaaagcattaaggagacagtgtttacccatttgtgaagaatctgttcccccgccctcatctttcactcccatccacaaaataatctctcccgttctccccacacccctacctccaacacccactcttctccatgattaaatcacctcccaccagttcccacctttaacattcccccctaaaattccacatgaatattggtagagacacaaattcaaatcatatcattctggctcttgctccccaaatcttgtatccttgtcacactgcaaaatacattgatgacttctttactgtcccccaaagacttaactcattccagcatttactaaaatgtacaaggacttacagaccccatgcaagtccaaaacccagcaggccagtcattgaatcctacagctccaaatcatcttttctgaatggacatctctcatccgatcacaggagtgtcatggctgggctcccaaggccttgggcagctctgcacctgtggctgtgcacggtctatcccccacagctgccctcatgggctgggctggtgttgagtgcctgtagcttttccaaactaaggttggaaaagccagctgttggtgggtctatgaatctggggtctggagaatggtgcctccatatttagggaccccagccctatattatccttctgtactgccctagtaaaggtttcccatgaggctctgcctcttggaaaagcttctacctgaaaacccaggtttttccgtagatactctggagtctagacaaaggctcccaagcctctagttttgttctctgtgcacctgctggcttaacactatgtggaagccaccaaggcttgaagcttacacccctgaagcgtgatgcaagctgtacctgtgcatctttcagccatggctggaactagagctgcagggatgcaggcagcagtgtcttgagactgcacatagaggggggtcatggaactggcctaggaaaccattcttctctccgaggccccagggcctatgatagcaagggctgctgcaaaggtttctgaaatggcttcaaggccttttccctattgtcttggctattagcactgggctccttttcatgcaaatttctaaagccttcctcagttttcccctgaaaatcagcttttctttttgaccatttggccaggctgcaaatttttgagttctgtttctcatttaatataagagttgggactcatttaatgtaagatccatccagatgtcattttctcggtcacacataagggcacaggctgtttgatacagacaggacaccccttgagctttgctgtccagaagttcattccaacagatacgcagtaagtcatcacccacaagttcaaagtttcacagatctccagggcagtgtcactgtgcatccacgttctttgctacagcaaaacaaaaggcaccttggctcctgtttgcagtaagttcctcattttcatctgagagcttctcaatctgatccttactgtctattttcctatgagtcttctgatcacaagtatttaacaactttttacaaagatccaaactttccctcatctccctgtctttgaagtcctccaaactctccagaactccatctgctacccccttctgaacctgcttctacattttcagctatctttgtcacagtctggcagtgtggtaaaggaagacaagcccattttcttgggaaaaattcaaggggcttcagatacttgaatgaaaagaagctgagtgctgattgccaagacattagggagaaggccttgaagacatttaatagatccactttgcagtaataattttctccataatcataaagaaaagaggtttaataggttaatgattctgcaggctgtaaggaagcatagtggcttctgcacctgacaggactcaggaagcttcccaatcataccagaatgtcaaggggcaaggagatgtctcatatgggaagagtaggagcatgacagagaaaggaaacaggtgtcatgtcccattatacaagcagatctcatgagaactcactatcacaaggtcagcatcaagaagatggtgcttaaacattggtgaaggatccgccccacacacccaactctcactgtttctaggcagaagcctcctacagatgcagagcctcttggaaaacctctattatggaagtgcagaaagaaaatatgggtttggagtccccacacaggtggccaccaaactccagatcccggattcatagacccactagcaactcacgcacttagtgtggtaaagctacaggccctcaataccagcccaccccacgagaacagctgaggggctaaaacctgcaaagccacaggtgcactgccctagtagaggttttccacgaggctttgcctctgcagcaggctactcccccttcctactaccccccaccctcccaccaccctactgccaacccactcctcccaatcctacccatcccttttaccttccaccgccaccaacttcctgtccataattaagtcacttgcttcaacattagggattacaattccacatgagtttcatagggacacacaggaaaaccatataattctgaccctgatattccagaatctcatgtccttatcacagagcaaaataccatcatgacctctcaaaagtttgcaaaagtcttaactcattccaaatgtaaaaaattcagtctcatctgagacaaggccacagtcccttctgtctatgagtccctgaatttaaaacggagttcttttctttcaaggtacaatgatggtagagacattgtgtaagctttctcagtccaaagggaagaaatttcccagaaaaataatacaaatgggcctacaggcccaatgcaagtccaaaacccagcgggacagtattcactcagtctctcagctccaaaatcatcaagagaactcactatcatgtgaacagcattaaggagagcgtgtttatccatttgtgaaacatccgccccccaccctcatctttcactcccacccacaaaaaaatctcttctattctccccactcccttacctccaacccccatgcttctccatgattaaatcgcctcccaccaggccccatttttaacattccccattataattccacatgattttggtagggatgcagagccaaatcatattattctgaccctggcccccgtatctcatgttcttctcacactgcaaaataccatgatgccttctctacagtttcccaatctcttaactcattccagcatttactgaaatgtccaaagcccaaagtctcttctgagacaaggctggggtctcttctgcccctgagcctctgaaatacaaagtaagttaactactaccaaagtacagtgattgtacacacattgggtaagtattcccagccaaaaggaagaaattagccagaaagaagaacaaaacacagatgggacttacaaaccccataggagtcaaaaatccaacagccagtcattgaatcctacagttccaaaccatttttttgaatccagatcccacattcagagcacaagggtatgaggcctgggctcccaaggccttgggcagctctgcacctgtgaagttgcagggtctaacctccacagttgtcctcatgggctgggctgatgttgaatacctataggttttccacaatgagggtgcaagctgctagtaagtctatgaatctggtgtttgcagaatggtgcctccctgtattggggttccaaccctatattttccttctgtactgccctagtaaaggaggctctgcctcttggaaaaatttcgacctggacacccaactttttccatacatactctggagtccagacaaaggatccccagcctccagttttgtgctctgagcacctgctggcttaacactatgtggaagccaccaaggcttgcagtttgcaccctcggaagcagtgacccaggctgtacctgtgcatctttcaaccatggctggagctggagcttcaggaatccagccagcagtgtcctgaggatggacatagcagcggggtcatggggctggagaaggaaaccattcttttctcccaggcctcagggcctgtgatagcaagggctgctgaaaaagtctctgaaatgccttcaaggcctttttaacattgtattggctattagcactgaactccattttataaacatttctgaagccttcttgaactttcccactgataataagcttttctttttgaccacttggccaggctgcaaattttcacaacttttaatctctccttgtcatttaaatatgtttcaccttgaggtcatttctttggtcacatattttcatgtgagaccttctaagcctggtggtcactgtccatccttatgtcaccttcttaattataactatttaacaagtctctacactgatccaaacttttcctcatcttcctgtcttcttccaagacctccaaactctccaacctctggccattacacacttcttaacctgcttctacattttcagctacatgtgtcacagcctggcaatgtggtaaaagaagaaaagtccatttcaggagaaaaattaatgcaggctttagacgtttgcctgaaaagaagctgagtgctgattgccatgacaatagggaaaaggtcttgaaggcatttcatagctccactttacagcattaattttctgtataatcagaaagaaaagaggttgaactggctcatggttctgcaagctttaaataaatcatagaggcttctgcttctgggaggactcaggaagcctcccaatcataccagaagaccaagcaacaatgggaagttttatatggcagaagtagaaacaagacagagaggaaaaaggtggcacacgttgtataaacctgttatacaaccagatttcctgagaactcactatcacaaggtcagcatcaagaagatgttgcttaaccattggtgaaagatctgccccctaccacccccaccccccactgtttccaggcagaagcctgaggcacaggcagagcctcttggaaaacctctactagggcagtgcagaaaaaatatatgggcttggaggccccacgcaaccatccaccagaccacagattcatagacccaacaatagcttgcattctcagtatggaaaagccacaggcactcaacaccagcccagccgacgaaggcagccatgggggctaatgcctgcaaagccacaggtgcactgccctggtagagcttttccatgaggctctgcctctgcagcaggctactccctcttcctactgcccaccacactctcaccaccctactgccagcctactcctccccaccctacacacttgttttcccttccacccctaccaacctcccatttgtgattaaatcacttcccaccaggccccacctgcaacagtcaggaatacaattcaccaagagtttttgtagggaaacacagtcaaaccatattattctgaccctgaaacccccacatctcatgtccttctcacacagaaaaatacaaacatgccttttcaaaagtttccaaaagtcttaactcattccagcagtaactcaaatgtagtaagttcaagtctcatccaagacaaggctgcaatctcttctgcctatgagtccctgaatgtaaaagacaattcttttctttcaagttacaatgatggcacaggcactgggtaagctttctcaatccaaagggaagattttccctgaaaaataacacaactgggacacaggcccaatccgagtccaaaacccagcaggacagcattcatttatcatgagaactcactatcgcacagactgcattaaggtgatagtatttaaccatttgtgaaggatctgccacccatccccatgtttcaccctcacccacaccatgaacccccattctcccacatccaccttccaacccccattctctaccatgattaaatcaccttctaccaagccccacatttgacattccccattacaattccacatgagttttggaagggacacagagccaaatcatattattctccccttggtccccaacctcatgaccttcttatactgcaaaatataatgatgtgttctctaaggtcccccaatgtctgaactcattccagcatttactcaaatgtccatttgtgaaggatccaccccccacccctccctttcagccacaaatgcaccacaatccgccaacactccccacccacctatagccccaaccctccacaccacccccagcatccaccctccatgctccaccatgattaaatcaccttccaccagcccccacctttaacatttcccattaaaattccacatgagttttggtagagacacagagccaaaacatattattctgcccctggtcccccaaatctcatgtctttttcatattgcaaaatgcaatgatgccttccctagagtcccctaaatctcaattcattccagcctttactcaaatatccaaagcccaaagtctcttctgagacaaggctgcagtctcttctgccctgagactctgaaatacacagcaaattaactacttccaaggtacaatgactgtactggcattggttaagcattcccaggcaaaaagaagaaatttgccagaaagaagcataaaacacagatgggacttacaaactccctgcaagtcaaaagcccagcagaccagtcatccatcatacaccaccaaatcacctttttggaatctatgtccacatccagagcacagggtgatgtgacagctgggatcccaaggccttgggcagctctgcacctgtggcattgcagaatctttcccctacagttgccctcattgactaggctggtgttgagtgcctgtagcttttcaacactaagggtgcaagcagctggtgcgtctatgaaactggggcctggaaaatggtgcctccctgtatggggactccaaccctatactctccttgtgtactgcctgagtagaagtttacgatgaggctctgcctcttggaaaagcttctggctggacaatcaggctttctgatacatcctctgaagtctagatgaaggctcagaagcttctagtccttgctttatgcaactgctggcttaacaccttgtggaagccaccaagtcttcgagcttgcatcctctgaagcagtgacacaagctgtacctgtgcatctttcatccatggctggagctggagatggagctgcagggatgcaggcagcagtgtcctgaggctgcacacagcagtggagccatggggctggcccaggaaaccatccttttctcctaggccccagggccagtgacagcaagggctgctacaaaagtctctgaaatgccttcaaggcctttttcccattatcttgaattattagcactcggctcctttttatgcaaatatctgaagccttcttgactttccccctgaaaatcagcttttctttctgaccacttgtggagattacaaattttccatatgtttaagctctgcttctcatttaaatataagttccaacttatagtcatttctttgaccacacataggtgcgcaggctgttcaatgtaggcaggacaactcttgagcattgttgcttagaagttcattctaccagatacactctaaatcatcaccctcaagttcagtttcacagatctcctggaaaggatcaatgtgtagtcaattactttgctaaggcaaaacaaaaaaaccttggctcctcttcccagtgagtacttcattttcacctgagatcttgtaagcctgacattcactgtccatccttatgttagccttttaatcacaactattgaacaagtctctgcaatggtccaaactttccctcatcttcctgttttcttccaagatctccgaactctctaacctctggccattacctaattcagaacctgcttctacactatcaggtatcattttcgcagcctggcaatgtggtaacagaagaaaagtctattatcagggggaaacatcaagatggtatccaatatttgcattgaaaaaagctcagtgctaataaccaagagattgggggaaggcctagaagtcatttcatagcttcacttcgcagcattaattgtctgtatgtacataaagaaaagaggtttagttgactcacagttcttcaggctataaagaaagcatagtggattctgcttgtaggaggactcaggaagcctcccaatcataccagaggccaagcagcaatgaaatgtttcatatgccagaagtagaagcaagacagaaagaggaaagaggtgcgacatcctcttatacaactagatctcatgagagctcactgtcaggagatcagcatcaagaagatggtgcttcactgttggtgaaggatccgcccaccaccccatatccaccacccactgtttccaagtagaagcctgagacagaggcagatcctcttggaaaacctctactatggctgtttagaagaaaactatgggcttggagcccccatgtaggataccagcatcctccaatccccagattcatagaaccatcaacagctcacacccccagtatcgaaaagctacaggcactcaacaccagcccagcccatgagagcagctacaggtgctaaaccctgcaaagccccaggtgcactgccttagtagagtttttccatgagcctctgcctctgcggcaggctactcccatcctgctacacaccaccctacagccagcctactcctccccaccttacccacctgttttgacttccaatccaacccctctcccatccatgaataaatcacctcccaccaggcctcacctgcaacattggggattacaattacatgtgagtttaggtagggacacacagctaaacaatattattctgaccctgatcccccaaatatcatagccttctcacagagtaaaatacaatcatgccttttcaaaagctgccaaaagtcttaagtcatttcagcattaactcaaatttaaaaagttcaaagtctcacctgagaaaaggctacagaccctttggcctataagttcctgaatttaaaagggatttattttctttcaagatacaaagatggtacaggcattgggtaagttttgtcaatccaaaggggagaggtgtgccaggaaaataacacaaatgggatcacagggccaatgcaagtccaaaacccaggaggccagtatccattcaatctcactgctccaaaacaatcacaagaactcatcatcatgaggaaaggattaaggagatggtgtttaaccatttgtgaaggatcctacccccacccccacttttcacccctcacccccaccataatccacccattctccccaatccccaccttccaatacccagtgccctccacgattaaatcaccttccacctggccccactttcaacatttctgattacaattccatatgagtttccatagggacacacagccaaatcttattattctgtccctgccccacaaatctcatgtccttctcactttgcaaaatacaatgatgccttacttaccattccccaagccactgtgctttttttttacagcctgcagaaccatgagcccattaaacccctttttgttatgatcatacagaaaattagtattgtgaagtgaagctatgaaatgccttcaatgacttttccccatcatctcggctaagacccccaaggtcttaactcattccatcatttactcaactgtctgaagcccaaagtctcatctaagacaaagatgcagtcccatctcctcctgagcctctgaaatacaaagcaagttaactacttccaaggtatgattgtccagacattgagtaagaattcccaaccaaaaggaagatttatgccagagacaagaacaaaacacaaacgggacttacaggtcccatgaaaatccaaaacccagcaggccagttattcaaacctacagctccaaagtcatcctttttcaatccttgtcccacatccagggcacaagtgtatgagggctgggttcccaaggccttgggcagcactctacctgtggctttgcagtgttcagtccccacagctgccctcatgggctgtgctggtgttgagtgcctgtagtttttacccacagagggtacaaagttcttggtgggtctatgaatctggggtctgcatgatgctggcatccagtgtgggggccccaaccccatattttccttctgcactgccctagtagaggtttcccaggagtctctgcttttttggcagccttctgtctggacaccaagacactttcatacatcttccgaaatctgtatgaaggctccaaagcctctgggctagtgctctgtgcactcgctagcttaaaactatatggaagccatgaagccttacagcctgtaccctctgaagcagtgatgcaatctgtacctgtgcatctttcagccaaggtcggtgcaggagctggggcagccgggtttcaggcagcagtgtcctgaggctgcacacagcagcagggtcatggggctggcccaggaaaccattcttctctaataggccccagggactgtgacagcaagggctgctgcaaacatctctgaaatgcctccaaggctttttcccccagtgtcttggctattagcactggcctccattttatgcaagtttctggagccttcatgaattttccccctgaaaatcagcttttctttttgaccacttggccaggctgcggatattccaaacttttgagctctgcttgtcatttaaatataagttccaacttgaggtcatttcctcggtcacacataacctcggtcacacatgaaagcacaggctgtttgatgcagacatgcccccacccttgtgctatgctgcctagaagttctttccaccagatatgcactaaatcttcaccctagagttcaaaatttcacagatcttgagggcaaggtcgccctgcagccatgttctttgctacagcaaaacaaaagctaaccttggctcccgttcccagtaagatcctcattttcatctgagaccttgtaagcctggccttcactgtccatccttctgccagccttttaatcacaactatttaacaagtgcctacaatggtccaaatttcccttcatctccctgccttctttcaagatctccaaactctccaacctctggctgttacccacttctgaacctgctttacattttcagctatctttgttgcagcctggcaatgcagaagaaaaagaagtccattttcagggggaaaacttcaggaagccttcagatatttgcattaaaaagaagtccagtgctaatagccaagaagatggggaaatgtcattgaagatatttcatagctccacttcgcagtactttattttctgcatgatcataacgaaaaggggtttaattggctcatggttctgcaggctgtaaagaaagcatagtgacttctgcttctgggaggactcaggaagcctcccaatcataccagtaggaaaacagcaatgaaatgtttcatacagcaggagtaggagcaaggctgagagaggaaagtggtgccacaccgtcctataaccacatctcatgagaactcactatcactaggtcagcatcaagaagatggtgcttaaacattggtgaaggatccgccccccaacacagctccaccccctaccgttccagacagaagcctgctgcagaggcagaggctcttggaaatcctgtactgtggcagtgcagaaggaaaataagggctttgagtgactatgcaggaggccaccagcctctagaccccagattcatagacctaccaacagttcacaccctcagtatggaaaagtgataggcactcaacaccagccaagcctatgagagcagccttgtgggctaaagcctgcaaagccacaggcgcactgccctggtagaggttttccaagagccgctgtctctgcagcaggctactcccccttcctactacccaccaccctcccaccaccctacagccagcctactcttccccaccctacccaccccttttttcttccacccctacccctcccatccatgattaaataatctcccaccagaccccaactccaacattttggattacaattccacatgagtttttccaggggcacacagccaaatcatattatgctgaccttgaccccaccaaatctcatatccttctcacagaataaaataaaatcgtgccttttcaaagtttccaaaagccttaactcattcccacattaactcaaatgtaaaaagttcaaagtctcatctgagacaaggctacaatctcttctgcctatgagtccctgaagttaaaagggtgttcgtttctttcaaggtacaatgatggtacagatattgggtaacttttctcaatccaaagggaagaaatttccaagaacaataacacaaatgggacccaggcccaatggaaatccaaaatcccacaggtcagtgttcagtcaatctcacagctccaaaatcatgaagagaactcaatatcagaaggacagcattaaggagatggtgtttaaccatttgtgaaggatgcacccccacccctgccttacacccccaaccccaccacaatcccctccaaccctcctcaccacccaatcccccccatccctccccaaccctgaaacatccaacctcctctctccatcatgattaaatcaccttccaccagcccccacctttaacatttcccattaacattccacgttagctttggtagagacagagagccaaaacatattattctgtccctggtcccccagagttcatgtttttctcacattgcaaaatgtaatgatgccttccttagagtctctcaaatcttaacccattccagcatttactcaaatgcccaaagccgagagtcttatttgagacaagtctacagacccttctgcccatgagccactgaattatatataaagcaagtttactacttccaaggtgcaatgattgtacaggctttgggtaagcattcccagccaaaaggaaaaaaattgccagaaagaagcacaaaacacagatgggacttacagaccccatgcaagtcaaaaacccagcaagccagtcattgaatcctacagctcccaaatcatcttttctgaatctatacctcacatctggggcacaggggtggatggctgggctcccaaggccttgggcagctcagcatctgtggctgtgcagtgtctatctccgacaggtgcccttatgggctgggctggcgttgagtacctgtggcttttccacactgagggtgcgagcagttgacgggtctatgaatctggggtctggaaagtggtgcattcctgtgtgggggctgcaaccctatatgttccttctgtactgccctagtaaatgtttcccatgaggctctgcctcttggaaaagcttctgcctcaacacccaggtttttctgtatatactctggagtctagacaaaggctcccaagcctctagttctgtgctctgtgcacctgctggcttagtactatgtggaagccaccaaggtttgaagcttgcacccctgaagcagtgatgcaagctgtacctgtgcatctttcagccgtgactggagctggagctggagctggagctgcagggatgcagacagcagtgtcctgaggacggacacagtagcgcgaccatgggactcaatcaggaaagcattcttcggtcctagacctcagggcctgtgacagcaagctctgctgcaaaggtctctgaaatggcttcaaggccttttaaccttgtcttagctattagcactgggctccattttatgcaaatttctgaaggcttcttgaattttcccactgaaaatcagctttgctttttgaccacttggccaggctgcaaattttccaaacttttaagccctgcttctcatttaaatataagtttcaatttgaggtcatttattcagtcacagagaagaccacaggctgttcaaaacagacaagacacctcttgagctttgctgcctacttcatttcaccagatataccctaaatcatcacactcaagttcaaagtttcagaggtctccagggcagggacaccatcctgccaagttctttgctaagggaaaacaaaagtaaccttgactcctgttcccagtaagttgctcattttcatctgagaccttctaagcctggtcttcactgtccatccttcagtcactattttaattatagctatgtaacaagtctccatggtcacccttttaatttaacacatctctacaatagtccaaattttccctcatctttctttcttcttccaagccccccaaactgtgcagcgtccggtggttacccacttctgaacctgcttctacgttttcagccaccgttgtggcagcctagcaatgtggtgaaaggagaaaagtccattttcagggggaaaattcaagaaggcttcagatattaccatataaaagtgggcaaatgttaatagtaaaaaaaaaaaaaaatggggaaaaaaccttgagggcatttcatggctccactctacagtacaaattttctgtaatattatttttaaaagagttttaattggctcatggttctgcaggttgtaaaggcagcaagtggtttctgcttctgggaggactcagggagcctcccaatcataccaaaaggccaagtgacaatgagatattccatatggcaggagtaggaagaagacacagagaaggaagaggtgccacaccagtttatacaaccagatctcatgagaactcactatcaggagatcagcatcaggaagattaaccaatggtgaaggatccacccacaccaccgcctactgtttccaggcagaagcctcctgcagagcagaacctcttggagaacctctacgagtgcagtgcagaaggaaaatatgggcttggagcccccacacaggaggccaccatcctccagactgcagatacatagacccaacagcttgcactctctgcgtggaacagctacaggcactccacaccagcccagcccatgagagcagccatgggggctacaccctgcaaaaccacaggtgcactgccctagtagagactttccctgagcctctgcctctgcagcaggctactcccacttcctgctacccaccaccctctcaccaccctactaacaacctactcctcaccctacccaccccttttccttccacccccggcccccgaccatccacgattaaatcacctccagcaggccccacctccaacattaaagattacaattcacttgagttttgttaaagaaacacagccaaatcatattattctgaccctgatccccacagtctcatgtgcttctcacagagaaaaatatattcatgccttttcaaaagtttccaaaagtcttaaatcattccaacattaactcaaatataaaaaaatcaacttctcatctgagacagttctacagtacgttttgcctatgagtctctgaatttaaaaggatgttcttttctttcaaggtacaataatggtacaggctttgggtaagatttttcaatccagagggaagaaatttccgaggaaggaaacacaaatgggaccacaggcccaatacaagtccaaaacccagaaggccagtatccattcaatcttacagctccaaaatcatgaagagaactcactatcacaaggacagcaataaggagaatgtttaatcatttgtgaagcatccgccccacaactcccaattttcactcctcacccgcaccataaatcccccattctccctacgccccatcttccaaccccaactctccaccgtgattaaatcaccttccaccaggccccacctttaacattccgatgacaattccacatgagttttggtagagacacagagctgaattttattattctgtccctggctccccaaatctcatgtccttctcacattgaaaaatataatgatgccttccctacaatcccccaaaatcttatatcattacagcatttattcaaatgttgaaagcttaaagtctcatctggcacaaggctacagttgcttaggcccatgagcctctgaactataaagcaagttaactacttccaaggtacaatgtttgtagagccattgggtaagcattcccagccaaaagaaagaattttgccagaaaaaaaacaaaacatagacaggacttaccggtcccatgaaactccaaaaccaaaaggccagtcattcaatcctacagctccaaaatcaccctttttgaaaccctgtcccacatccagggcacaggggtgtgagggctgggctcccaaggccttgggcagcttggcacctgtggctttgcagggtttatgcccacggctgccctcaggacctcggctggtgttgagtgcctgtgacttttccccactaaggatacaagttgttgggggtctatgaatctggggtctgcatgatggtggcctccagtgtggaggctccaaccccatgttttccttctgcactgccctagtagaagtttcatataaggctctgcctttttgggatgtttttgcctggacacccaggcatttccatacatcttccaaaatctatagagaggtttccaagcctctggtctcatgctccgtccaccaatggcttaacacaatgaggaaattaccaaggcttctagctggcaccctctgtagcagtgacccaagctgtagctgtgcatctttcagtcatggctggagctggagctggagctggagctggagctgcagggatgcaggcagcagtgtcctgaggctgcacacagagggggggcatggaactggcccaggaaaccattcttctctcctaggccccagggcctgtaacagccagggctgctgcaaaggtctctgaaatgccttcaaggccttttccctattgtcttgtctattagcactgggctccttttcatgcgagtttctgaagccttcctcaactttccccctgaaaatcagcttttctttttgaccacatggccaggctgcaaattttccaaacttttgagttctgtttctcatgtaatgtgagagttgggactcatttaatgtaagtctcatccagaagtcatttcctccatcacacataagaacacaggctgtgtgatgcagacaggacacctcttgagtttgctgctcagttcattccaccagatactcagtaaatcatcaccctcaagttcaaaatttcacagatctccagggcgaggtcaccgtgcagccatgttctttgctaaggaaacaaaagtaactttgacttctgttcccagtaagagcttcattttcatctgagaccttctaagtcgggctttcactaaccattttcctgtgagccttctgatcacaagtgtttagcaattctttacaaagatccaaactttctttcatcttcttgtctttgaagccctccaaactctcccgacctctgtccgctactcccttctgaatctgcttctacattatcactatctttgccacagcctggcaatgtggtaaaggaaaacaagtccattttcaggggaaaattcatgaagccttcacatacttgaatgaaaagaagctgagtgctgattgccacgacaatgacatttaatagttccactttgcactactaattttctctatgatcataaagaaaagaagtttaattggctcatgattctgcagaccataaggaaacataatggcttctgaatctgggaggactcaggaagccttccaatcataccagaatgtccaggggcaatgacatgattcatgtggcaggagtaggcacaagacacacacaggagagaggaccacaccctattatacaaacagatctcatgagaactcactatcacaaggtcagcatcatgaagatggtgcttaaacattgaggaaggaacaaccacccacccccaactcccactgtttccaaacagaagcctgctgcagaggcagagcctcttggaaaacctctaccagggaagtgtggaaggaaaatatgggcttgaagcccccaggcagatggccaccaacctccagacaccagattcatagacccaccaacagctcacaccctctgtggaaaagctacaggcactcaacaacagcccagaccgtgagagcagctgcacgggctaaaccctgcaaagccacaggtgctctgtcctagtagaacttttccatgaggctttgcctctgcagcaggctgctcccccttgctactaccccccacgctcccaccattctactgccagcctactcctccccaccctaaccaacccttttgtgataccctaccttgttttaacctggtcgactctcccttagctgagagggccagacagactccatcttggctccttcacttgcagccccttacccaccccccttcctcaaggacttaacttgtgcaagctgactcccagcacatcaaagaatgcaattactgataagatactctggcaagctatatccacagttcccaggaattcgcccggttgatagtacacaaaaccccagcatttgtgtccagttgatagcacccaaagcccccacatctatcacctttggatggatttaaagcccctgcacatggaaatgtttgttttcctgtagccatttatctttttaacttttttgcctgttttgctgctgtgagagtccttcagcgaggctccccctcccctttctaaaccaaagtataaaagaaaatctagccccttcttccaggccaagagaattttgagcaccagcggtctctcagttgccggcaataaaggtctcctgaagtcgtctcatggtttggcgtttctctacaactcactcggttacaacccttttccttccaccccaacctcctccaatcaatgactaaatgatctcccccaggccccaccttcaacatttggaattacaattgcacctgaatttttatagggacacacagccaaaccatattattctgaccctgatattccagaatctcatgtccttaacacagagcaaaatacaatcaagccttttcaaaacttccaacagccttaactcattccaagtgtaaaaagttcaaagtctcatctgagacaaggctactgtcccttctgcccatgggttcctgaatttaaaagagatttcttttctttcaaggtacaatgatggtacaggtgttgtgtaagctttctcaatccaaagggaagaaatttcccagaatacacaaacgggaccgcagggcaaatgcaagtccaacacccagcaggacactattcactcaatctcacagctcaaaaatcatcaagagaactcactatcatgcggacagcattaaggagatagcgtttacccatttgtgaagaatcttccatcccaccctcatctttcactcccacccacaaaataatctctcccattctccccacacccctacctccaacatccactcttctccatgattaaatcacctcccaccaggtcccacctttaacattccccacgacaattccacatgaatattggtagagagacagaatcaaatcgtattattctgactcttgctccccaaatcttgtatccttgtcacactgcaaaatacaatgatgacttctctactgtcccccaatgacttaactcattccagcatttactgaaatgtccaaggacttacagaccccatacaagtcaaaaacccagcaggccagtcattgaatcctacagctccaaatcattttttctgaatggatatctcacatccagagcacaggtgtgtcatggctgggctcccaaggccttgggcagctctgcacctgtggctgtgcacggtctatcccccacagctgccctcatgggctgggctggtgttgagtgcctgtagcttttccacaccaaggttggaaaagccagctgttggtgggtctatgaatctggggtctggagaatggtgcctccatgtttagggactccagtcttatattctccttctgtactgccctagtaaaggtttcccatgaggctttgcctcttggaaaagcttctacctgaaaacccaggtttttccgtagatactctggagtctagacaaaggctcccaagcctctagttttgttctttgtgcacctgctggcttaacactatgtggaagccaccaaggcttgaagcttacacccctgaagcatgatgcaagctgtacctgtgcatctttcagccatggctggaactagagctgcagggatgcaggcagcagtgtcttgagactgcacatagaggggggtcatggaactggcctaggaaaccattcttctctccgaggccccagggcctatgatagcaagggctgctgcaaaggtttctgaaatggcttcaaggccttttccctattgtcttggctattagcactgggctccttttcatgcaaatttccgaagccttcctcagttttcccctgaaaatcagcttttctttttgaccatttggccaggctgcacatttttgagttctgtttctcatttaatataagagttgggactcatttaatgtaagacccatccagatgtcatttcctcggtcacacataagggcacgggctgttcgatacagacaggacaccccttgagctttgctgcccagaagtttattccatcagatacacagtaagtcatcacccacaagttcaaagtttcacagatctccagggcagtgtcactgtgcagccatgttctttgctacagcaaaacaaaaggcaccttggctcctgtttgcagtaagttcctcattttcatctcacagcctctcaatctgatccttactgtctattttcctgtgagccttctgatcacaagtattcaacaattctttacaaagatccaaacttaccctcatctccctgtctttgaagtcctccaaactctccagaactccatctgctacccccttctgaacctgcttctacattatcagctatctttgtcataccctggcaatgtggtaaaggaagacaagcccattttccggggaaaaattcaaggaggtttcagatacttgaataaaaagaagctgagtgctgattgccaagacattagagagaaggccttgaagacatttaatagatccactttgcagtaataattttctccatgatcataaagaaaagaggtttaataggttaatgattctgcaggctgtaaggaagcatagtggcttctgcatctgacaggactcaggaagcctcccaatcataccagaacgtcaaggggcaaggagatgtctcatttggcagaagtaggagcaagacagagaaaggaaacaggtgtcatgccccattacacaagcagatctcatgagaactcactatcacaaggtcagcatctagaaaatggtgcttaaacattggtgaaggatccgccccacacacccaactcccactgtttccaggcagaagcctccttcagatgcagagcctcttggaaaacctctattatggaagtgcagaaggaaaatatgggcttgaagtccccacacaggtggccaccaacctccagaccccagattcataggcccaccaacaactcacgcccttagtgtagaaaagctacaggccctcaataccagcccaccccacgagaacagctgaggggctaaaacctgcaaagccacaggtgcactgccctagtagaggtttcccacgaggctttgcctctgcagcaggctactcccccttcctactaccccccaccctcccaccaccctactgccaacccactcctcccaatcctacccatcccttttaccttccaccaccaccaaccccctgtccataattaagtcacctacttcaacattagggattacaattccacatgagtttcatagggacacacaggaaaaccatataattctgaccctgatattccagaatctcatgtccttatcacagagcaaaatacagtcatgacttctcaaaagtttgcaaaagtcttaactcattccaaatgtaaaaaattcagtctcatctgagacaaggccacagtcccttctgtctatgagtccctgaatttaaaacggagttcttttccttcaaggtacaatgatggtagagacattgtgtaagctttctcagtccaaagggaagaaatttcccagaaaaataatacaaatgggcctacaggcccaatgcaagtccaaaacccagcgggacagtattcactcagtctctcagctccaaaatcatcaagagaactcactatcatgtgaacagcattaaggagagcgtgtttatccatttgtgaaacatccgccccccaccctcatctttcactcccacccacaaaaaaatctcttctattctccccactcccttacctccaacccccatgcttctccatgattaaatcgcctcccaccaggccccatttttaacattccccattataattccacatgattttggtagggatgcagagccaaatcatattattctgaccctggcccccgtatctcatgttcttctcacactgcaaaatacaatgatgccttctctacagtttcccaatctcttaactcattccagcatttactgaaatgtccaaagcccaaagtctcttctgagacaaggctgcagtcccttctgcccctgagcctctgaaatacaaagcaagttaactacttccaaggtacaatgattttacaggcattggataagtattcccagtcaaaaggaaaaaatttgccagaaagaagcacaaaacacagttgagacttacaaacaccatgcaagtcaaaaacccagcaggatagtcattgaatcttacagctccaaatcatttttttttaaatccagatcccacatccagagcactagggtatgaggcctgggctccaaaggccttgggcagctctgcacctgtggctttgcaaggtctaacctccacagtggctctcatgggctgggctagtgttgagtacctgcagcttttccacaatgagggtgcaagctggtagagagtctatgaatctggcatttgcagaatggtgctaccctgtatgggagttccaaccctatatgttccttctgtactgccctactaaaggaggctctgcctcttggaaaattttgacctggacacccaggtttttccatatgtactctggagtctagaaaaaggatccccagcctccagttttgttctctgcacacctgctggcttaacactatgtggaagccaccaaagcctgcagcttgtgccccctgaagcagtgacccaagctgtacatgtgcatctttcagccatggctggagctggagcttcaggaatgcagccagcagtgtcctgaggatggacacaagagtggggccatggtgctggagaaggaaaccattcttttctcccaggcctcagggcctgtgatagcaagggctgctacaaaagtctctgaaatgccttcatggcctttttaacactgtattggctattagcactcaactccattttatgcaaatttctgaagacttcttgaactttctcactgacaatcagcttttctttttgaccacttggccaggctgcaaattttccaaacttttaaatatgtttcaccatgaggtcatttctttggtcacatataggaccacaggctgttcgacacagacaggacacctcttaagctttgctgcataaaatttccttccaacagatacaatctaaattatcaccctgatgttcaaaatttcacaggtctccaggttaaggacatcgtgccgcaacgttctttgctaaggaaaaaacaaaagtgaccttgcctcctgttcccagcaagctcctcattttcatgtgagaccttctaagcctggtgatcactgtccatccttctgtcacctttttaattacaactatttgacaagtctctacactgatccaaacttttcctcatcttcctgtcttcttccaagacctctaaactctccaacctctggccattacacacttcttaacctgcttctacattttcagctacatgtgtcacagcctggcaatgtggtaaaagaagaaaagtccatttcaggagaaaaattaatgcaggcttcagacatttccctgaaaagaagctgagtgctgatcaccaatacaacaaggaaaaggtcttgaaggcatttcatagctccacttcacagcactaattttctgtataatcagaaagaaaagaggttgaactggctcatggttctgcaagctttaaataaatcatagaggtttctgcttctgggaggactcaggaagcctcccaatcataccagaagaccaagcagcaatgggatgttttatatggcagaagtagaaacaagacagagagaggaaaaagctgccacatgttgtataaacctgttatacaagcagatttcctgagaactcactatcacaaggtcagcatcaagaagatgttgcttaaacactggtgaaagatctgccccctaccacccctccccccactgtttccaggcagaagcctgaggcagaggcagagccactaggaaaacctctactagggcagtgcagaaaaaatatatgggcttgtaggccccacacaggaggttaccatcctccagacccaagattcatagacccaccagcagcttgcactctcagtatggaaaagccacaggcactcaacaccagcccagcccatgggagcaaacacgggggctaaagcctgcaaagccacaggtgcactgccctggtatagaggttttccatgaggctctgcctctgcagcaggctactccccctttctactgcccaccaccctctcaccaccctactgccagcctatttctccccaccctacacacttgtttctcttccacccctaccactctgccgtttgtggttaaatcacatcccactaggccccacctacaacagtcaggaatacaattccccatgagtttttgtagggaaacacagccaaaccatattattctgatcctgacacccccacatctcatatccttctcacacagaaaaatacaaacaggccttttcaagagtttccaaaagtcttaactcactccagcagtaactcaaatgtagtaagttcaaatctcaaccaacagaaggctgcaatctcttctgcctatgagtccctgaatgtaaaagacaattcttttctttcaagttataatgatggcacaggcactgggtaagctttctcaaaccaaagggaagattttcccagaaaaaataacacaattggtacacaggcccaatccgagtccaaaacccagcaggacagcattcatttatcatgagaactcactatcacacagactgcattaaggagatagtatttaaccatttgtgaaggatttgccacccatccccatgttttgccctcacccacaccatgaacctccattctcccacatcccacatcccccttccaacccccattccctaccatgattaaatcaccttctaccaagccccacatttaacattccccattacaattccacataagttttggtagggacacagagccaaatcatattattcttcctttggcccccccaatctcatgtctttctcatactgcaaaatacaatgatgcattctctacagtcccccaatgtctgaaatcattccagcatttactcaaatgtccatttgtgaaggatccgcccccacccctgcctttcacccccaaccccaccacaatcccaaccctcaccaccccccaatcccccacctccccaccaccacaatccccccaaccctccccgtcccacaatcgccccaaccctcccaaccatccaacctccactctccaccaggattaaatcaccttccaccagcccccacctttaacatttcccattaaaattccacatgagttttggtagagacacagagccaaaacatattattttgtccctggtcccccaaagttcatgtctttctcacattgcaaaatgcaatgatgccttccctagagtcccccaagtcttaactcatcccaacatttactcaaatatccaaagcccaaagtctcttctgagacaaggctgccggatcttttgccccgagcctctgaaatacaaagcaagttaaccacttccaaggtgcaatgattgtacaggctttgggtaagcattcccagccaaaaagaagaaatttgccagaaagaagcacaaaacacagatgggacttaaaactccctgcaagtcaaaaacccagcaggccagtcattccatcatacagctccaaatcatctttttggaatctatgtccacatccagagcacagggtggtgtgacagctgggatcccaaggccttgggcagctctgcacctgtggcattgcagaatctttcccctacagctgccctcattggctaggctggtgttgagtgcctgtagcttttcaacactaagggtgcaagcagttggtgggtctatgaaactggggcctcgaaaattgtgcccccctgtatggggactccaaccctatactctccttgtgtactgccccagtagaggtttaccatgatgctctgcctcttggaaaagcttctggttggacaatcaggctttctgatacatgctctggagtctagatgaaggctcagaagcttctagaccttgctttgtgcacctgctggcttaacaccatgtggaggccaccaagtctatgagcttgcatcctctgaagcagtgacacaagctgtacctgtgcatctttcatccatggctggagctggagatggagctgcagggatgcaggcagcagtgtcctgaggctgcacacagcagtggagccatggggctggcccaggaaaccatccttttctcctaggccccagggccagtgacagcaagggctgctacaaaagtctctgaaatgccttcaaggcctttttcccattatcttgaattattagcactcggctcctttttatgcaaatatctgaagccttcttgactttccccctgaaaatcagcttttctttctgaccacttgtggagattacaaattttccatatgtttaagctctgcttctcatttaaatataagttccaacttatagtcatttctttgaccacacataggtgcacagggtgttcaatgtaggtaggagaactcttgagcattgttgcttagaagttcattccaccagatacactctaaatcatcaccctcaagttcagtttcacagatctcctgggaaggatcaatgtgtagtcaattactttgctaaagcaaaacaaaaaaccttggctcctgttcccagtaagtccttcattttcacctgacatcttgtaagcctggccttcactgtccatccttatgttagccttttaatcacaactatttaacaagtctctgcaatggtccaaactttccctcatcttcctgtcttcttccaagctctccgaactctctaacctctggccattacctaattcagaacctgcttctacactgtcagctatctttttcgcagcctggcaatgtggtaaaagaagaaaagaccattatcagggggaaacatcaagaaggcctccaatatctgcattgaaaaaagctcagtgctaatagccaagagattgggggaaaggcctagaagtcatttcatagcttcacttcacagcattaattttctgtatctacataaagaaaagaggcttagttgactcacagttcttcaggctttaaagaaagcacagtggtttctgcttgtaggaggactcaggaagcctcccaatcataccagaaggccaagcggcaatgaaatgtttcatatggcaggagtagaagcaagacagagagaggaaagaggtgcaacatcctcttatacaactagatctcatgagagctcactatcaggagatcagcatcaagaagatggtgcttcactgttggtgaaggatccgcccaccaccccatatccaccacccactgtttccaagcagaagcctgagacagaggcagatcctcttggaaaacctctactatggctgtttagaagaaaactatgagcttggagcccccatggaggataccaccatcctccagaccccagacccatagatccatcaacagctcacaccccatgtacggaaaagctacaggcactcaacaccagcccagcccatgagagcagctacaggtgctaaaccctgcaaagccccaggtgcactgccttagtagagtttttccatgagcctctgcctctgtggcaggctactcccatcctgctacacaccaccctacagccagcctactcctccccactttacccacctgtttttacgtccaatccaacccctctcccattcatgaataaatcacctcccacaaggccccacatgcaaaattcgggattacaattacatgtgagtttaggtagggacacacagctaaaccatattattctgaccctgatcccccgaatatcatatccttctcacagagtaaaatacaatcaggccttttcaaaagttgtcgaaagtcttaagtcattgcagcattaagtcaaatgtaaaaagttcaacgtctcacctgagaaaaggctacagtcccttttgcctataagttcctgaatttaaaagggatttattttctttcaaggtacaaagatggtacaggcattgggtaagttttctcaatccaaagggaagaggtttgccaggaaaataacacaaattggatcacagggccaatgcaagtccaaaacccaggagaccactatccattcaatctcactgctccaaaaccatcacgagaactcaccatcatgaagaaagaattaaggagatggtgtttaaccgtttgtgaaggatcctcccccacccccacttttcacccctcacccccaccataatccacccattctccccaatccccaccttccaatacccagtgccctccacgattaaatcaccttctacctggccccacttttaacttttctgattacaattccatatgagtttccatagggacacacagccaaatcttattattctgtccctgccccacaaatctcacatccttctcactttgcaaaatacaatgatgccttacttacaattccccaagctactgtgctttttttttacagcctgtagaaccatgagtcaattaaacctttttgttatgatcatacagaaaattagtattgtgaagtgaagctatgaaatgccttcaatgactattccccatcatcttggttaagacccccaaggtcttaaccattctagcatttagtcaaatgtctgaagcccaaagtctcatctgagacaaagatgcagtcccttctcctcctgagcctctgaaatacaaagcaagttaactgcttccaaggtatgattgtccagacattgagtaagaattcccaaccaaaaggaagatttttgccagagagaagaacaaaacacaaacgagacttacaggtcccatgaaaatccaaaacccagcaggccagttattcaaacctacagctccaaagtcatccttttccaatccttgtcccatctccagggcacaagggtatgagggctgggttcccaaggccttgggcagctctctacctgtggctttgcagtgttcagtccccacagctgccctcatgggctgtgctggtgttgactgactgtagtttttacccacagacagtacaaagttcttggtgggtctatgaatctggggtctgcatgatgctggcctccattgtgggggctccaagcccatattttccttctgcactgccctagtagaggtttcccaggaggctctgctttttggctccttctgtctggactcccaggtattttcatacgtcttctgaaatctatatgaaggctccgaagcctctgggctagtgctctgtgcactcgcgggcttaacactatgtggaagccatgaagccttatagcctgtaccctctgaagcagtgatgcaatctgtaccggtgcatctttcagccaagtttggaacaggagccggggctgccaggatgcaggcagcagtgtcctgaggctgcaaacagccgcagggtcatggggctggcccaggaaaccattcttctctcctaggctccagggcctgtgacagcaagggctgctgcaaacatctctgaaatgcctccaagactttttcccccattgtcttggctattagcactggcctccattttatgcaagtttctggagccttcatgaattttccccctgaaaatcagcttttctttttgaccacttggccaggctgcggatattccaaacttttgagctctgcttgtcatttaaatataagttccaacttgaggtcatttcctcggtcacacataacctcggtcacacatgaaagcacaggctgtttgatgcagacatgcccccacccttgtgctatgctgcctagaaatttattccaccagatatgcactaaatcatcaccctagagttcaaaatttcacagatcttgagggcaaggtcgccctgcagccatgttctttgctacagcaaaacaaaagctaaccttggctcccgttcccagtaagatcctcattttcatctgagaccttgtaagcctggccttcactgtccatccttctgccagccttttaatcacaactatttaacaagtgcctacaatggtccaaactttccttcatctctctgtcttctttcaagatctccaaactctccaacctctggctgttacccacttccgaacctgctttacattttcagctatctttgttgcagcctggcaatgcagaagaaaaagaagtccattttcagggggaaacttcaagaagccttcagatatttgcattaaaaagaagtccagtgctaatagccaagacgatggggaaatgtcattgaagatatttcatagctccacttcgcagtactttattttctgtatgatcataatgaaaaggggtttaattggctcatggttctgcaggctgtaaagaaagcatagtgacttctgcttctgggaggactcaggaagcctcccaatcataccggtaggaaaacagcaatgaaatatttcatacagaaggagtaggagcaaggctgagagaggaaagaggtgccacaccatcctgtaaccagatctcatgagaactcactatcactaggtcagcatcaagaagatggtgcttaaccattggtgaaggatgcgccccccaacacagttccaccccctaccgttccagacagaaacctgctgcagaggcagaggctcttggaaatcctgtactatggcagtgcagaaggaaaataagggctttgagtgactatgcaggaggccaccagcctctagaccccagattcatagacataccaacagttcacaacctcagtatggaaaagtgataggcactcaacaccagcccagcccatgagagcagccatgggggctgaagcctgcaaagccacaggcgcactgccctggtagaggttttccatgagccgctgactctgcggcaggctactcccccttcctactacccaccaccctcccaccaccctacagccagcctactcttccccaccctacccaccccttttttcttccaccgctacccctcccatccatgattaaataatctcacaccagaccccatctccaacatttgggattacaattccacatgagtttttccaggggcacatagccaaatcatattatgctgaccttgaccccccaaatctcatgtccttctcacagaataaaatacaatcgtgtcttttcaaagtttccaaaagccttaactcattcccgcattaactcaaatgtaaaaagttcaaagtctcatctgagacaaggctacaatctcttctgcctatgagtccctgaagttaaaagggtgttcgtttctttcaaggtacaatgatggtacaggtattgggtaagctttctcaatccaaagggaagaaatttccaagaaaaataacacaaatgggaccacaggcccaatggacatccaaaatcccgcaggtcagtgttcattcagtctcacagctccaaaatcatgaagagaactcactatcagaaggacggcattaaggagatggtgtttaacaatttgtgaaggatgcacccccacccctgccttacacccccaaccccaccataatcccctccaaccctcctcaccacccaatcccccccaaccctccccaacccccagccatccaacctgcactctccgtcatgaataaatcatcttccaccagcccccacctttaacatttcccattaacattccacaagagctttggtagagacagagagccaaatcatattactctgtcccgggttgcccaaagttcatgtctttctcacattgcaaaatgcaatgatgccttccctagagtctctcaaatcttaactcattccagcatttattcaagtgcccaaagcccagagtcttatctgagacaagtctacactcccttctgcccatgagccactgaattatatataaaggaagtttactacttccaaggagcaatcattacacaggtgttgggtaagcattcccagccaaaaggaaaaaaattgccagaaagaagctcaaaacacagatgggacttacagaccccatgcaagtcaaaaacccagcaggccagtcattgaatcctacagctcccaaatcatcttttgtgaatctataccccacatctggagcacaggggtggatggctgtgctcccaagaccttcagcagctcagcatctctggctgtgcagggtatatcccccacaggtgccctcatgggctgggttggtgttgagtgcctttgacttttccacactgagggtgccagcagttggtgcatctatgaatctggggtctggaaaatggtgcattcctgtgtgggggccccaaccctatatgttccttctgtactgccctagtaaaggtttcccatgaggctcagcgtcttggaaaagcttctgtctcaacacccaggttttcccgtacatactctggagtctacacaaaggctcccaagcctctatttttggctctgtgcacctgctggcttagtactatgtggaagccaccaaggtttgaagcttgcacccctgaagcagtgatgcaagctgtacctgtgcatctttgagccatggctggagctggagctggggctgcagggatgcaggcagcagtgtcctgaggatggacacagcagcgtgaccatgggactgacccaggaaaggattcttcagtcctagaactcaggaactgtgacagcaagctctgctgcaaaggtctctgaaatgacttcaaggccttttagacattgtcttagctattagcactgggctccattttatgcaaatttcggaagccttcttgaattttcccactgaaaatcagctttgctttttgaccacatggccaggctgcagattttccaaacttttaagccctgcttctcatttaaatataagtttcaatttgaggtcatttattcagtcacagagaagaccacaggctgttcaaaagagacaagacacctcttgagctttgctgcctacttcatttcaccagatataccctaaatcatcacactcaagttcaaagtttcagaggtctccagggcagggacaccatccagccaagttctttgctaaggcaaaacaaaagtaaccttgactcctgttcccagtaagttgctcattttcatctgagaccttctaagtctggccttcactgtccatccttcagtcactcttttaattatagctatgtaaaaagtctctatggtcacccttttaatttaacacgtctctacaatactccaaattttccctcatctttctgtcttcttccaagacccccaaactgtgcagcgtccggtgattacccacttctgaacctacttctacattttcagccaccgttgtggcagcctggcaatgtggtgaaaggagaaaagtccattttcagggggaaaattcaagaaggcttcatatatttccatataaaagaagccaaatgctaatggtaaaaaaaaaaaaaggtggggggaaaccttgaaggcatttcatagctccagtctacagtacaaattttctgtaatattattttttaaagaggtttaattggctcatggttttgcaggatgtaaaggcagcaagtggtttctgcttctgggaggactcagggagcctcccaatcataccaaaagcccaagtgacaatgagatgttccatatggcaggagtaggaagaagacacagagaggaaagaggtgccacaccaggttatacaaccagatctcatgagaactcactatcaggagatcagcatcaggaagattaaccaatggtgaaggatccacccacaccaccgcctactgtttccaggcagaagcttcctgcagaggcagaatctcctggagaacctctacaagtgcagtgcagaaggaaaatatgggctcggagctcccacacaggaggccaccatcctccagactgcagattcatagacccaccaacagcttgcactctctgcatggaaaagctacaggcactcaacaccagcccagcccatgagagcagccatgggggctacaccctgcaaaaccacaggtgcactgccctagtagagactttccatgagcctctgcctctgcagcaggctactcccacttcctgctacccaccaccctctcaccaccctactaacaacctactcctcaccctacccaccccttttctttccacccccggccccctcccatccatgattaaatcacctccagccaggccccacctccaacattaaagattacaattcacgtgagttttggtaaagaaacacagccaaatcatattattctgactctgatccccacagtctcatgtccttctcacagagcaaaatatattcatgccttttcaaaagtttccaaaagtcttcaatcattccaacattaactcaaatgtaagaaaatcaacatctcctctgagacaagtctacagtaccttttgcctatgagtccctgaatttaaaaggatgttcttttctttcaaggtacaataatggtacaggctttgggtaagctttttcaatccaaagggaagaaatttcccaggaagaaaacacaaatgggaccacaggcccagtacacgtccaaaacccagaaggccagtatccattcaatcttacagctccaaaatcatgaagagaactcactatcaaaaggacagcaataaggagattgtttaatcatctgtgaaggatctgccccccaacccccaattttcactcctcacccgcaccataaatcccccattctccctacgccccatcttccaacccacactctccaccgtgattaaatcaccttccaccaggccccacctttaacattccgaggacaataccacttgagttttggtagagacacagagctgaattttatttttctgtccctggctccccaaatcacatgtccttctcacattgcaaaatacaatgatgccttccctacagtctcctaaaatcttatgccattatagcatttatacacatgttcaaagcttaaagtctcatctggcacaaggctacagttgcttagacccatgagcatctgaaatataaagcaagttaactaattccaaggtacagtgcttgtacaggcattgggtaagcattcccagccaaaagaaagaattttgccagaaaaaaacaaaacacagacaggacttactggccacatgaaactcctaacccagaaggccagtcattcaatcctacagctgcaaaatcaccctttttgaaaccctgtcccacatccagggcacaggggtgtgagggctgggctcccaaggccttgggcagcttggcacctgtggctttgcagggtttatgcctctcggctgccctcaggggctcggctggtgttgagtgcctgtgacttttccccactaaggatacaagttgttgggggtctatgaatctggggtctgcatgatggtggcctccagtgtggaggctccaaccccatgttttccttctgcactgccctagtagaagtttcatataaggctctgcctttttgggatgtttttgcctggacacccaggcctttccatacatcttccaaaatctatagagaggtttccaagcctctagtctcatgctccgtccaccagtggcttaacactatgaggaagttaccaaggcttctagctggcaccctctgtagcagtgacccaagctgtagctgtgcatctttcagtcatggctggagctggagctggagctgcagggatgcaggcagcagtgtcctgaggctgcacacagagggggggcatggaactggcccaggaaaccattcttctctcctaggccccagggcctgtaacagcaagggctgctgcaaaggtctctgaaatgccttcaaggccttttccctattgtcttgtctattagcactgggctccttttcatgcgagtttctgaagccttcctcaattttccccctgaaaatcagcttttctttttgaccacatggccaggctgcaaattttccaaacttttgagttctgtttctcatgtaatgtaagagttgggactcatttaatgtaagtctcatccagaggtcatttcctccatcacacataagagcacaggctgtgtgatgcagacaggacacctcttgagtttgctgcccagttcattccaccagatactcagtaaatcatcaccctcaagttcaaagtttcacagatctccagggcgaggtcaccgtgcagccacgttctttgctaaggtaacaaaagtaactttgacttctgttcccagtaagtgcttcattttcatctcagaccttctaagtcaggctttcactgaccattttcctgtgagccttctgatcacaagtgtttaacaattctttacaaagatccaagctttcattcatcttcttgtctttgaagccctccaaactttcctgacctctgtccgctactcccttctgaacctgcttctacattatcgctatctttgccacagcctggcaatgtggtaaaggaaaacaagtccattttcagggggaaaattcttgaagccttcacatacttgaaagaaaagaagctgagtgctgattgccaagacaatgacatttaatagttccactttgcactactaattttctctatgatcataaagaaaagaggtttaattggctcatgattctgcagaccataaggaaacataatggcttctgaatctgggaggactcaggaagtctcccaatcatatcagaatgtccaggggcaatgacataattcatgtggcaggagtaggcacaagacacacacaggagagagggccacaccctattatacaaacagatctcatgagaactcactatcacaaggtcagcatcatgaagatagtgcttaaacactgatgaaagaacaaccacccacccccaattcttgctgtttccaaacagaagcctgctggacaggcaaagcctcctggaaaacttctaccagggaagtgtggaaggaaaatatgggcttgaagcccccatgcagatggccaccaacctccagaccccagattcatagacccaccaagagctcacaccctctgtggaaaagctacaggcactcaacaacagcccagaccgtgagagcagctgcacgggctaaaccctgcatagccacaggtgctctgtcctagtagaacttttccatgagttttgcctctccagcagactactcccccttcctgctacccccaccctcccaccactctactgccagcctactcctccccaccctaaccaacccttttgtgataccctaccttgttttaacctggtcgactctcccttagctgcgagagccagaaagactccatcttggctccttcacttgcagccccttacccaccccccttcctcaaggacttaacttgtgcaagctgactcccagcacatcaaagaatgcaattactgataagatactctggcaagctatatccatagttcccaggaattcgcccggttgatagtacccaaaacccccgcatttgtgtccagttgatagcacccaaagcccccacatctatcacctttggatggatttaaagcccctgcacatggaaatgtttgttttcctgtagccatttatctttttaacttttttgcctgttttgctgctgtgagagtccttcagcgaggctccccctcccctttctaagccaaagtataaaagaaaatctagcccctgcttccgggccaagagaattttgagcactagcgggctctcagttgccggcaataaaggtctcctgaagtcgtctcatagtgtggcgtttctctacaactcactcggttacaacccttttccttgcaccctcaacgacctccaatccatgattaaatcatctcccccaggccccaccttcaacatttggaattacaatcgcacctgaatttttatagggacacacagccaaaccgtattattctgaccctgatattccagaatctcatgtccttaacacagagcaaaatacaatcatgccttttcaaaacttccaacagccttaactcattcctgtgtaaaaagttcaaagtctcatctgagacaagggtactgtcccttctgcctatgggttcctgaatttaaaagagatttcttttctttcaaggtacaatgatggtacaggtgttgtgtaagctttatcaatccaaagggaagtaatttcccagaaaacacaaatgggaccgcaagccaaatgcaagtccaaaacccagcaggacactattcactcaatctcgcagctcaaaaatcatcaagagaactcactatcatgcggacagcattaaggagatagcgtttacccatttgtgaagaatctgccctcccaccctcatctttcactcccacccacaaaataatctctcccattctccccacacccctacctccaacacccactcttctccatgattaaatcacctcccaccaggtcccacctttaacattccccacgacaattccacatgaatattggtagagacacagaatcaaatcatattattctggctcttgctccccaaatcttgtatccttgtcacgctgcaaaatacaatgatgacttctctactgtcccccaatgacttaactcattccagcatttactgaaatgtccaaggacttacagaccccatacaagtcaaaaacccagcaggccagtcattgaatcctacagctccaaatcatcttttctgaatggacatctcccatccagatcacaggtgtgtcatggctgggctcccaaggccttgggcagctctgcacctgtggctgtgcatggtctatcccccacagctgccctcatgggctgggctggtgttgagtgcctgtagcttttccacaccaaggttggaaaagccagctgttggtgggtctatgaatctggggtctggagaatggtgcctccatgtttagggactccagtcttatattctccttctgtactgccctagtaaaagtttcccatgaggctctgcctcttggaaaagcttctgcctgaacacccaggtttttccatacatactctggagtctagatgcaggcttccaagcctctagttttgttctctgtgcagctgctggcttaacaccatgtggaagccaccaaggcttggagcttgcacccctgaagcagtgatgcaagctgtacctgtgcatctttcagccatggctggagctggatctgcagggatgcaggcagcagtctcctgaggctgcacacagagggggtcatggaactggaccaggaaaccattcttctctcctaggccccagggcctgacagcaagggctgctgcaaacatctctgaaatgcctccaagacgttttcccccagtgtcttggctattagcactggcctccattttatgcaagtttctggagccttcatgaattttccccctgaaaatcagctttcctttttaatcacttgaccaggctgcagatgttccaaacttttgagctctgcttgtcatttaagtataagttccaacttaaggtcatttcctcggtcacacataacctcagtcacacatgaaagcacaggctgtttgatgcagacatgcccccacccttgtgctatgctgcctagaagttctttccaccagatatgcactaaatcttcaccctagagttcaaaatttcacagatcttgagggcaaggtcgccctgcagccatgttctttgctacagcaaaacaaaagctaaccttggctcccgttcccagtaagatcctcattttcatctgagaccttgtaagcctggccttcactgtccatccttctgtcagcctttcaatcacaactatttaacaagtgcctacaatggtccaaactttccttcatctctctgtcttctttcaagatctccaaactctccaacctctggctgttacccacttccgaacctgctttacattttcagctatctttgttgcagcctggcaatgcagaagaaaaagaagtccattttcagggggaaacttcaagaagccttcagatatttgcattaaaaagaagtccagtgctaatagccaagacgatggggaaatgtcattgaagatatttcatagctccacttcgcagtactttattttctgtatgatcgtaatgaaaaggggtttaattggctcatggttctgcaggctgtaaagaaagcatagtggcttctgcttctgggaggactcaggaagcctcccaatcacagcagtaggaaaactgcaatgaaatgtttcatacagaaggagtaggagcaaggctgagagaggaaagtggtgccacaccatcctgtaaccagatctcatgagaactcactatcactaggtcagcatcaagaagatggtgcttaaccgttggtgaaggatccgccccccaacacagctccaccccctaccgttccagacagaagcctgctgcagaggcagaggctcttggaaatcctgtactatggcagtgcagaaggaaaataagggctttgagtgactatgcaggaggccaccagcctctagaccccagattcatagacctaccaacagttcacaccctcagtatggaaaagtgataggcactcaacaccagccaagcccatgagagcagccatggggcctaaagcctccaaagccacaggcgcactgccctggtagaggttttccatgagccgctgcctctgcagcaggctacacccccttcctactacccaccacccacccaccaccctacagccagcctactcttccccaccctacccaccccttttttcttccacccctacccctcccatgcatgattaaataatctcacaccaggcctcacctccaacattttggattacaattccacatgagtttttccaggggcacatagccaaatcatattatgctgaccttgacccccccaaatctcatatccttctcacagaataaaatacaatcgtgtcttttcaaagtttccaaaagccttaactcattcccgcattaactcaaatataaaaagttcaaagtctcatctgagacaaggctacaatcccttctgcatatgagtccctgaagttaaaagggtgttcgtttctttcaaggtacaatgatggtacaggtattgggtaagctttctcaatccaaagggaagaaatttccaagaaaaataacacaaatgggaccacaggcccaatggacatccaaaatcctgcaggtcagtgttcattcaatctcacagctccaaaatcatgaagagaactcactatcagaaggacggcattaaggagatgttgtttaaccatttgtgaaggatgcacccccacccctgccttacacccccaaccccaccacaatcccctccaaccctacccaccacccagtccaccccaaacctccccaccccgccaaccatccaacctccactctccatcatgtttaaaccaccttctaccagcccccacctttaacatttcccattaaccttctgcttgaactttggtagagacagacagccaaaacatattattctgtccctggtcccccaatgctcatgtctctctcacattgcaaaatgcaatgatgccttccctagagtctctcaaatcttaactcattccagcatttactcaaatgcccaaagcccagagtattatctgagacaagtctacactcccttctgcccatgagccactgatttgtaaagcaagtttattacttccaaggtaaatgattgtacaggcaatgggtaagcattcccaggcaacagaaaaaaagaaaattgctagaaagaagcacaaaacacagatgggactcataggatacataagtgtccaaaacccagcaggccaatcactcaatcctacagctccaaaatcatcgtttttgaatccttgtcccacatccatggcacagggctgtgagggctgagctcccaaggccttgggcagatctgacctgtggcttggcagcgttcagcctctgcagctgcctctcatggacagggctactgttgagtgcccatagattttccacactgagggtgcaagctgtttgtaggtctatgaatctggggtttggacattgatgcctccctctgtgggggcttcaaccctataagtctcttctttgctcccctagtagaggttccccatgaggttctgcctcttggaaaagcttcttcctggccatccaggattttctgtacatcttctggagtctagacaggagctcccaagcctctagtctctttctctgtgcacctactgtcttaacactatgtggaaaccatcaaggctttgagccacctctgaagcagtgacccaagctgtacctgtgcatctttcagccatggctggtgctggagctgcagggatgcaggcagcagtgccctgtggttgagcacagcagcagagccatgggactggcccaggaaaccattcttctcttctctcctaggccccacggtctgtgacagcaagggctgctgcagaggtctctaaaataccttcaaggccagtttcccactgtcttggctgtttgcactgggttcctttttatgcaaataacctaagccttcttgaattttcccccttaaaatcggcttttctttttgaccacttggccaggctccaaattttccaaattttacatctccacttgaagttccaacttgaagttatttcttaggtcacacataagaacacaggctgttcaatgcagacaggacacctcttgtgctatgctgcctagatgttcatttcaccagatacatcctaaatcatcacccccaagttcatagtttcacagatctccagggcagggtccctgtgctgccacgtcctttgctaaggccaatcaaatgtaatattggcccctgttcgtaggaaattcctcattttcatctgagaacttttaagtctggacgtcagtgtttacccttttctcagccttctgatcacaagtatttaacaagtctctatagtggtccaatattttcctcatcttgttgtcttctaagctttcccaactcttcctacctctgtcttttaccgacttctgaacccggttctacattgtcagctatctttatcagagcctggcaatgtgataaaagagaaaagtccattttcagggggaaaattcacaaaggcttcagatatttccatgaaaataagctgagtgctggttgccaagacaaaggggaaagggccttgaaggcatttcatggctccacttcacagcactaattttctgtatgatcataaagaaaagaggtttaattggctcatggttctgcaggttgtaaaggaagcatagtggcttctgcttctgggaggatcaggaagcctcccagtcataccagaaggccaaggggcaaggagatgtttcatatggcaggagtagaagcaagactgagagaggaaagaggtgccacaccctgttatataaccagacctcatgagaacacactatcatgaggacagcgtcaagaagatgctgcctaaccattggtgaaggatctgcctcccacccccacctcccaatgtttccagggagaagcctgctgcagacgcagagttcttgggaaacctctactagggcagtgcattaggaaaatatggacttggagcccccacacaggggactaccaccctccagaccccagattcatagacccaccaacagcttgcaccctccgtgtggaaaatctacaggcactcaacactagtccagtccatgagagcagacatgtttctcaaacctgcaaagccacaggtgcactgccctagtaggggttttccatgaggctctgcctctgcagcaggctactcccccttcctctacccaccaccctcccaccaccctacagccagtctactccctcccaccgtacccacccctttttcccttccacatccacccccacccatccatgattaaatcagtccctcccactccctctcatactcttatccctccaaacccttccaatctttgtttgctacccactactgagcctgcttctactttttcaggtatctatatagcaggttggctatgtagcaataacaaaaatcccatttaaggggaaaaattcaagaagatttcagaaatttgcatataaagaagccctgtgctaatagccaagacaaaggaaaaaaggccttgaagacatttcacagctcctctctgcagttctaattatctgtattattgtaaataaaagaggtgtaatttactcatagttctgcaagctgtgaaggaagcatagtgtcttctgtttctgggaggaatcaggaagcctcctcattatatcagaaagccaagggaaaatgagatgcctcctaaagcaggagcaggaggaagacagagtgaggaaagaggttccacagcctgttaaggaatcagatctcatgagaactcactcactatcaggaggtgatggtcctttatcaaggtgatggtcctttatcattcgtgaaggatctacctgcaccattttatgactaaatctttttccacctaggccccgcctctgacatcacagaatataattccacatgagttttggtagggacatagagaaaaaccatattattctgtccctgaccccacgaatctcatatccttctcacattgcaaaatacaatcatgccttgccagcagtctcccaaagtcttaactcacttcagcattaactcaaagttacaaggtccaaagtgtcatctgggtcaaggctacagtctctttgcctatgagtctctgaaataaaaagcaagttcactgcttctaaggtacaatgatggtacaggcattgtgtaagctttccatatccaaaaggaagacattttccagaaagcttcttacttctctctgagacctcttcagcctggccttcactgtccatgtttctgtcaggatttttgtcacaaccattgaaccagtctctaggatggtccaaaagttttctcatctatctgtcttcttttgagccctccaaattcttccaacctccatccattacctggttccaaagctgcttccacatttccaggtatctttatagcaatgctccagtcttcatttgccattttctgtatgatttattttgaaaaagaggtttaattgtctcatggttctaagcacagtgcttctgcttctaggaggcctcagaaatctttcaataatcatggaaggcaaagaaagaatcagttctctcacatggcaagaggaaaacacagagagtagggatgtgacatagagttttcagtgaccagttctcatgagaagtcactcattattgtgagcatggtacaaggggatggtgctgaaccattcatgagaaatttgccttcataattcaatcaccttatagcaggatccaccttccacattaggaaatataactcaacatgagattccgtgtggacacatattcgaattgcatcatcgatctttgaatataaagacttccacagcaggctttatccagccaacttctttgagactctttatagggtttgaggtctagagcacatacactaaaatattcatacttcaaaaagcaataaagtggtattatcatttttccaaaagttacagcggtagtttaggcattcatagcatgatttagttcacatttgctaccgtttctattctatcaccatattaactgtttcctatacaattctgtattcagctggatttcagttgagcacaaaaccatccttgtactagctctttgttagtgttattattctgctgtagaaagtatccttgaactggaaacagtccacgatggagtatcgagtcattcaacactatcaattcctgggtgactttttgaaaaagtagtatctcttgttgcaagaaatgctgcatctgtgagtccatgtctctcactggaattggatggaagtggtgaatttcagccaaagtggccaaagaaatcctgttcctgtgattctgacatcatcagcctctgcacctttatattcccttctgccacttgttgtttgctctccgtgactttagtaagagcttccttgtgtatgtggatgatgtccaggatgttggtctggtgtccctgagacagcactaacaggtccatggctgggtccaggtcctgcctggactgattggcaaagacctcacagacagtgtggaaggcatctatactcaagtgaatggcctggtccagctccaaggcctggctgaggctgaagaagaactggcagccttctgatgctctttcttaaagcctgtcaccactcattggctgtgaagttgagctgagtgccctgttgtccatcttcttggtgaagcacttgaagccgtcaatcttgctctcccactcctaaaggttgagtgtcgccctgggggtgggctcagggtcaggaagaatctggcactcaccaactcatccttctcagccttcctcttgccctgtctccaggctgtctcttcagtgctggtggggcgcatcaggaagtgacaaaaaatgtggcactgtgcctgcatccagaagctggccgtgtggttcatccaccagattgggccctttctgcacttgaacatagaccccacttcaccatagatgccttccacactgtcagtgagctctttgccaatcagcccaggcaggacctggacccagtcatggacctgttaatgctgtctcagggacaccaggccaacaccctggacatcatccacatacccaagtaatctcttaccaagtccttctcaagatggcctgtggtctgcctcttggcatccaagaagcccacagtgctgtagaagccctgatgcatggaatggagccccaaaggcagcacacaccccgctcctgagcctactgctcatttcctctatgtggctccatttgcagcacatttgttgcactgaggcctgtgcatgccaggcaaggccaagctgactcaaagagcaaccagccacctctgcaagggtgtgccaggagccggtggaccagccaccaaccttactccctgccagtcagggtaaatcagttattgtgccctggaggtagagccccagtgccatccgcttttcctcaggcctccactccatcagctgtcaggtggtggtaactcaggctgtgggaacctggccatccctgtttcctttaagtgggggaggttggtggctggtccacctgctcctggcacacccttgcagaggtaactggttgctctttgagccagcttggcctcacctggcatacacaggccccgggtactgacaagctgctccgagtgagtttgtcttgtcttgggccaaattctaagtctggccagggccacagaaggccaagtcccctgggtggtaatcctggctgctgcaggggggcctatggtgcccctcccctcccagggctcaggatgaggtccaactgggacaggatgctttaggtatgggacttgtgccccaggaggggtcctctatcacacaggttgggtgagaagatgtatggcatgctgctggctgccagggctgttgggatgcacgttcacccttcccttcagggacctcaaagtgaccagcttcccctttaagaatgacttcccaaggctcaggagccatctggggctgcagagcagctggccgcatgctgccctggcttcttccatgttgtgctggtcactacccaccaagggggttcagatgcaggcacgatgcaggacggttgtctctggacctgcgtcttggttatcatggagctggactgggcctggtgacagggccctgatggggttgtcctgggtggtcacgggggtgatgagaaaaatgcagaatggaattgctgcgaggatgaatgagacgaccgtcagcacagaacaggcacccggtgagtgttcagggattcccctcagtagctgcccagaggccaaaaccacccacctgatagtgactgtccccaagccaggaggaagagaaaagagcatgtcccactcacctgagtctgatcagtgagctgtgttgagatgtgcctctcatctagaaaacggtccttcacacagagccactcacgacactgctgtgtgtctctaactgctccacaacacagaggcgatggggactcagcaacagtgacactgtggggtgacacaacccaccacaatggaagcctgcttgggtcaacagggcccagagtcagtgtcctctatcccctgaactgacatgtgtgcatgcaatgtgtttgtgtatgcatgtgtgcctgtgtgtgtgtgcgcgcacttatgtgtgtgtttgtcttgcttctctggacaggcctagcttctccactcatgggtgcacccaggtcctcatcactgtcaccttagagtggggatgcagacagaggaggggcactgcataatgctgagagggctggcaccctctctaggtggaacactggtcatttgtaaagttgtaggtctgccaagcagtattgcattcaacacatcttctcactttctctttccagccaccctccagggtgccctgactcaccttccctgcagatggaggtgaggctccacagacaaaccccctacctgaggtcacacagtggccagcgggccaggtactgaccaaccgccgctgaccaggttcccagtgatgaggcccctaatgaccactcctccattgaccaggtcccactgatcaagtccccactgaccatgtcttcctaaccaggcccgcagttaataggcctcatgggccggactccactgaccaattttccactgacctggtccccagtgacaagaccaggtttccactgacaagaccactatttaccaggttgctgctcacccgaccccccactgaacaattctccatggatgagtccccagctgaccaagccacctctgaccaggccctcactgaccaggctccaagccaccaaggcctcacactgaccaggcccctggtatactgtatatgccccaccaaccagtttttcattgtttatgttccaaccaatcaggccccactaataaggccaccactgactaggtccccccactgaccaggcttccaatgactaggtcaacaggtccccactgatgaggcctttactgaggagcccaccactaaccaggcgcctgctgatgaggtcccaaatactaggtcctgatgaccaggtcacctctgaccatggtccactgaccaggcccctgagcagccgtgctcaaagtcttattacaatgtccccctcagctcacagaccctccctccctgcatgtgggcccagaggtcaggccctggggtttttttttttttttttggggaaatggcctttcctccaagacacagggagagacagtcggcctcagggtccaggttcccagctccacactcaccccaaaggccctctgggcccatctcaaaggagacagtgaggtggcctggcactgcctggacacaccatctaccctattcctgagtgtcaaagtgttaggaagggagggacatttggcagatgagacacactgtgctgttgggtctcccaggacccttcccacagagccccgatctaaagacacagcacagaggctacaggaagactaatccagaacctctgaggctgagccagggaccacatgaggactgtccccagagagccagaaggccctttgctagtttcttggtacctcagtggatgcagcagctgttcttctgttggggaccagtgagtacacgctggggagggctcgcctgtgcttcctcagtggctccacctctgcttctaaaaaaaattactcattccagcgctggggcagagaaaatacaagatgagcttagaacatcttgtgccagaaagtaaaaaagtgctgacagagtaatggagacaaatcaaaaacacaacaagtcagcttggaatgtctaccactggcctaatcttggggaattggagcatcagaatcatgagctttccttctcccttatttattggttttatttctccatgtagaccaaagaagagaataagaaaataatcatctggcaaccatcatagtaataattgttcaaacacaagtcatccatgaaatgctaaatctagtgggttctgaggagtaaccagatatttacagagcctcaaagtatctccatacaaaatatggttgaactacaaaaacaaaatagtagcattagcatggacaaacctggcaggtactccttaagtctcctaagtaataaaaactgtaaactgcaaataagccttcgatgacctttactaacctttactaaagtatcaatgatgacttggttgtttaaacagctgatatttgggcaatttgagtatgtcaaactaaataatacttgttttcatttgcaagatccacttaaaacttaaggaggctaaaaaacatcatttaaaataccctataaattatcatcgtacatatgatacaaaaatatcctacttcagtaaatattgtaatgttatatattttatgagaaacaattaaaatgtgtaaatagcccagtaataaagttttataatcttttaaatcatacaatttttccttaaaactttatggctaaatattctcttcattagatgtggcttaccagtggattctagagaagaaaatagatgggagcaagtgtccaacacagcaacagctagaaagaaaaataaagaattatgtcctttacctaaagcacttcagttaactaaatgtgagtttaaaaactaaagagttgtgaactttatcagagtttataagtatgagaaatatgtatgtacatttacaatacaaaattactatttaataatttacacatggcattaattctaattgtgtttaaatatcagagctttttcattcttcattcatgtaatcaacagccatgtgccaaggtactagaaccagcactgtaattacaagaggaagatggtgtggtccacctctcaacagtcatatgctataacctaaaaaaacagacaggcaggtaatgtccatatagagtcatagataccatgacaggtatacagcagggcactactggaacacacagaagggacacctacccacttttatgtcaacatcatgggctttctgatggaggagatatcataggttgatacctgaaggacaaggaaaagcttgccagatagagggaagaggcaaaggcaaagagcctgagatgaggaagagccctgcagagttccactccatcaagtttgggctacagcaaagggtagagtgaagtaagtggtgagagacaaggctgagtaacttgacaagaattacattgacatgggtgtttttatttcatggtgaaaaatctggaatgtttcctgagaacaagtgtaagccaatgacacagtaaatgacaggagatttaaaatgtcacctgtcaagtgactgcttatgaagggttattgctcaactaagcatttctgaatgagtctaaggtctgttggccttcaatttctaccaaaaccctgagaacttgatgatgcctgtgttttctgagaatcgtttcagtgtgctggctgacagttccatgaggatggcaaaacttaagaaagtgtagagccagtgaaaaagagatgcacagacttcttgggaattttttaagctacagaacatgatgaatttatggtgcataagtacagtcttctctgtgaaagtttttgttttcacatctttcattagatgtgtgtaagaaaaaaaatacttgacgtagtatctactaacccaagaatgaaaaggaatgccatttgctatttacactttatttctaaaataaacctaaatttaattaataaattttggcaacatacttctctttgtttctctaattatttgttccacacagtccagctccatctaaaataagtaaaaataataataatgtttaagttaaacaagaaacattatcatgaaaataatgtatcatttacaaaatgtggcctttagtatttttagtgactagacataacttgaagtttgcttaaatagaaaaataatcacataaataaagtaaaatttctacttattttaagtttagataacagaggatgtatatgtgtaatgctgtttagagtaatcggacaaaaatacagttaatattgatctattgcatatacatgattttagaaaggtagtgttttattagtacaaaggttaaacaatggccaggcatggtggctcatacctgtaatcccagcacttggggaggccaaagcaggcagatcacaaggtcaggagatcgtgaccatcctggcctacatggggaaaccccatctctactaaaaatacaaaaattagctgggcgtggtgatgcgaacctgtagtcccagctacttgggaggctaaggcaggagaattgcttgaagccaggaaatggaggttgcagtgagccaagactgcaccactgcactccagcctggtgacggtgagaccttgtctcaaaaaaaaaaaaaaaaagattaagtaattaaagccatcttttgcaatgaatgcattgctttgaaattcttagaaaactctgccctttataaaagtttaatccattttttacttcaataaattttatcttaaaaagaaatttctattctctacttatagtaaacttttctttcttttttttttttttttttagtttatattctaaattaaggtggtacctctgtaggattcttccaaaggcatattgagggatgccgaggtttgcagtacagttgagcccatcacacaggtagtgagcgtaggacccagtaagtagtttttcaaccctggcccactctgtccctccctgctcttatttcctagtgtctattattcccatgtttatgacaatgtgcacccaatgtgtagcttccacatgagtgaaaacatgagatacttggtttctgtttctgcattggtttgcttaggagagtggattccagctgtatccatgttgctgcaaatgatgtcactttgttctttttatggctgcttagtattccatggtatatatggaattttccaatctaccttggattttcaatctaccttggatgcacctggattgactccatgtctttgctattgtgaatagtgctgcaatgaacatacatgtgcatgcatctttttgttacaatgatttattgtcctttcagtataaccctagtatagtaatggggttgctgcatccaatggtcattcttagttcttaatttccaaactgctgtccatagtagcagaattaatttgcattgccacaaacggtgtgtgttcccttttctccacagcctccccaacatcttttatttatttatttatttattttactttttaacaaaagtcattctgactggtgtgaaatggtatctcactgatgttttgtttggcatttttctgattagcaatggtaagcatttgttaatgtttgttggccacttacatgtgttattttgagaagagtctgttcatgtcctttgcccatttttaatggtgttatttattttttgcttgttgatttgtttaggtctcttatagattctggataataggataatatgcatttgctatacccatagtttgtgaatattttcttccattctttaggctgtctgtttaatcccgtgatagtttctcgtgctgtgcagctctttagctaaattagatcacacttgtcaatttttgttattcttgcaattgcttttgaggacttagccataaattgacaaatatgatgtctagaagagtatttcctaggttttcttccaggatttttatagccagaagatgtactcttatgtaagaaaagcacaagcctttttttttttttttttttttttgagacggagtctccatcacccaggctatagtgcagtggtatgatcttggcttactgcaacctctgtctcctgggttcaagtgattctcctgcctcagcctcctgagtatctgagattacacatgcctgccaacatgccttgctaatttttgtatttttactagagacaggtttcatcatgttgaccaggctgatctcaaactcctgacctcaggtgattcacctgccttggcctccccaaattttgggattacaagtgtgagccaccacgcctggccaagcacaaagcttttaacataaaaatggaaatgaacattttagtgtttggtttaattcataaaatgcaattattttggattctcctaaataataaacatccatatgtggtaaagtgtttggatgccaatcattcagttgtgattatgggtgggaagagttgagatggtgcaaataaacttttttctaattttttattttcaagacggagtctttccctgttacccaggctggagtgcagtggtgcaatctcagctcctgcaacctctgtctcccaggttcaagcaattctctgcctcagccttcctagtagctgggattacaggtgcccgccaccacacctggcttttttttttttttttttttgtacttttagtagagacggggtttcaccatcttggccaggctggtcttgaacttctgacctcgtgacattcctgcctcggcctcccaaagtgctgggattacaggcatgagccaccgcacctgcctggtgcaaagaaactttaaaagtgacaagggccgggtgcggtggctcatcctgtaatcccagcactttgagaggctgaggcaggcagatcacaaggtcaggagttcaagaagagcctggccaatatggtgaaaccctgtctctactaaaaatacaaaccttagctgggtgtaatggtgggtgcttgtagtctcagctacttgggaggctgaggcaggagaatcacttgaacccgggaggtggaggttgcagtgagtggagatggcaccacaacactccagcctgggtgacagagtgagacactgcctcaaaaaaaagaaagaaaaatgtggtatgaaccacagccaaactacaatcaattagagagtaagccaaagtatctcaaagtatatcatcagttataaggcaataacatgcaatttctaaaacctaacttaaatgcagcttttaaagacattttaaacatgtcagtttagtcacatttattgaataaagttagcaaatggatatctctcaaaaatgagagctccagggaattaaaaaatgtaaagttcccatttcctttctgtgttaacacagctaattatgatctttacttaacatgcataagtcaacagaacaactcagtatttcaccaaattaaaaacaagaattacgctagagaaatgaaaccctaaagagaaacggtcatataacgaacctcagtcaagtagttctggcagttatttgaggtctgagggtttgaagtaggaattcttacgggcatttggggaatatattttctgttgagtcctatactagtaagattttcaacacaaggtgactctgggcctcgccttgtaggaagagtgctgagaaaatatttcacccgctctttctccataaggagcttggtgctgatcattgctattttcttattagatctataaagatagcaaagacaaatgcttagtatttcatttttccttaaatgattcttaatgacttgtagtttttaaaaacttgccctgagagtaaaccaaattacccactaaacagtgttttcacactgaagatgtgtgagagcatacctattgtaaggaattatacttttaaaatcactctaaagaagcacctgtgtttctaaggtgatttatactgaagaagcagctcaaacaaagtagacagggaagagaaatggctaccagtgatgtatggctcaacgggtaaaacttgctgccttctaaaatggctctacctgtaagattctgaagattccacttgaaatacttgtatttaaagggtaacaacatgggaaaaggaatatgttgatttgcttgattataagaaccacttcactagaaataattatatcaaaacatcatgttgtgctccttaatgtaggttaagaaaactaaaatgaacaaaaaaaatctaggaatacttgtgtttagtaaaccagtttcaggtttcacccttgtacatttcaccaattatctaggaccaattaaacatttggtaatgaggaataattcagagcaacaactcctaggggagaactagattgtttggttgttgatcaaaaagaactaaagcatctctgaaggcaattagcccccagcactgtgaccaaggcactggaggtggggcttgttctttttgccttccacacaccccttcagactgaacaaggtgttattttttaaccgctttgtgaattacacttctttaaattcctgtgataattattccctatttcataaggatgcctttctataacatcttgaatatgttacacaggtagtctttcttgaggcaccctctagtcataatactaaagatcacaattaaaaacgattgtgcccagagtagcagtaccacttgacactttgggtttaggtcgtgatctactgaaaaataaactcattaatattactatttagggaaattctgacaagtaatttaaaacaagatcactttattaattataaagcttcaaaaatacttagtaaaaaaacttacagattaactacaagagacttttcaggagaaaaaagccatacaaaagcaaaaaaaaaaaaaaaatgagaggagagacagaaactatccttgaataacattttaaaggtaagattacttactaacattattttccaaaattacattgtcaaattagcattgacttcctactaatatcctgaagccatctcactaaaaattatgctttcaaaacaaattattgagctgaattcattttctataagtgtatgtttggacttacttcgttaatttttttgacatggaattgttagctttcaatgctactgcaaaggcttccttgtattcttctaatttggttgtaacctcttcataagtagttttcattttggagaatttacattccacatctttaagtgtgagttccttcttatttagtgaagccgtattacccttgtttaactgctctaattgtttttcatattgtgtttatttctaaaacaaatgaaaagaatatatttttaaaacaattataacctaattattatatgtttgttgcctttcattttgagccagtgattcaaagagcaattttgaatatgttaaaaaaagaggctgaagcttaaaatgtttatcagcagtatcaaaactaataactgaattcagaatcaagtctgatttataaaaatttgaaaccataattatgttagtattaatgtaatctggtcgtataaaaagcaatagaatccattcataattttaaaaagtgatcaatgaacaaagtagcttaagaccaattcaaaagtatcacataatttctaaatcacaactttttcttatgccaactggtcttaatcatcaaatgactccatagtaagaatcattactctgaaagattgattttgttataataatggaaatttaaatatttaaaagaaaaaacagatgccatttttttttctaaaactctacaaagcaaattgctacaagagaggcagaggaaacacaatatacacatatccaaaatataatttgcagtgaaataaaggaaagcacattacagataaacttacctgatttaaaaaactaacctgtaaatggatttcttctaatttttctactgccgtcattgccctttcatctagctccgatttatattcttgtagtttactaagttctaccatattgtcttccatatgtgtcttaagatttaatatttcttcttccaacatctttttatccttctcaagtttttcacattgctgttgtacttttttcatagataataactcctgttgaagaacttgattgtctttagccaaatcgacacattttgaagatacagcttccttctctgctgtaagatcatcaaactgcatgaataaaatagtatagcttgataatgaagtaggctgagaataatctaatacaaaatcaatagcaaattttgaaatgcatttactcggaataaactgttatctgtagtgcagtagattcttcaaatgtgaacccttaaattactcagaattttaagaacaaagttaaagctaccatgagtcacaaaaatacattatttaactatcatcatctttgtcacagaacttttgcacttcatcttacttttatttttctgataatttatttttgttcctccttaagtagcactaagctatctcttagtaaaaggtgtctatcccgcttccctcattatcattccccataatatgtcaaaaaaagtttcagaaatatcacactgagttatttaggccaaagtcaataaatggctctaggaataagactttgaaaataatataacactctatactaggcatggtgggtcatgcctgtaatcctagcactttaaaaagctgtggcagaaagattacttgaggccaggaatttgagatcagccagagcaacatagtgaggccccatctctacaaaaaaaagtgttttttaaattagccaggcatggtggctcatgtctgtagacccagctatttgggagaccaaggcaaaaggatggtttgtacccagagttcagggctgcagtgaattatgaccacatcactgcccttctgcctggatgacagacaaagaccctatctcaaaaaacacaaaataatgaatcctgtaaataagtattctgatgccataagcctttccttaaactgcaaatgtttcatgctaatttgagttgcattttaagaagtaatgattcttggggtaaaggccacagaatacagcacccagaaataaatccacatatttccagccaagtgattttggatgaacatgccaagaacatacactggggaaaggacagcctcttcaaatgaatggcactgggaaaactaaatatccatatggagaagaatgatactagcttcctatgtaacaccatataacaacataaactcagaatcaattgaagactgaaatgtaaggcccaaaattatcaaactactataagtaaacatagggaaaattcttgaggacagtctgcacaaagatttttatgggtaagatatcagaagcataggcaaaaaacaaatgatagacaaatggtactacattaacctaaaaagcttctgtccagctaacaactgagtgaagagaaaacttgtagaatgggagaaaatatcatcaagctattaatctaataagggactaatatccaaaatgtacaagaaattcaaacaacttgacagtaaaaaaaatctgagttcaaaattgggcaaaatatctaactatacttttttttagaaaaaagaaatacaaatagccaataaataaatttaacaatgctcattatcactaatcctcagagaaatacaaatcaaatctacaatatgatataatcttgcttcaatttgaataaattatcatcatggaaaagataaaaaaaaaatgctggtgaggttccagagaacagtaaactcttatgtgctgttggtgggaaggtaaattagtgcagccactatagaaaacaacatgaggtttcctcaaaaaattaataatggaactgctgagggatccagcaagcccacgactgggtattcaggcaatagaaagaaaacaatagatcaaaaggaagcctgtcctcatatgtttattgtagcactagtcactacggctaatgtatggaatcaacctacatatccatcaccaaaagaaaagacaaaaaactgtggcacacatacacaatggaatactattcaccgtataaaggaattaaatcctgttatcgtggccacgtggatcagtctggaggatgttatgttaagtgcagacacagaaagataaatactgcacattctcactcctgtgtgggagctaaagaaaaattgagggctgggcaacatggctgatgcctgtaatttcctagcacttagaaagacaaaggcaggagagtcacttgaggccaaaagttccagagcacctgggcagcatagggagatatttctataaagtcaaaaatcagatgggtgcaagggtgcatgctcataatcctagcttctcaggaggctgaggtgtgaggatcacatgagcccaagagttgggggctgcagtgaactatgatcaaactactgtctcccatctgggtgactacagttgcccagagcccagactacactagcaagaccctgtctcttaacaacaacaaaaatctcaaagaagtaggggaaggtaggttggttaatggatatggaattacagttagataagaagaatgagttctggtgttctgtggcattgtagggtgaatatggttaactatgatttattgtatattttttaaaagccagaagattgtgaatgttcacaattcaaagaaatgaaaaatggttgaagcagtaaatgtgctagttagcttgatcattacaccctatttacatgtatcagaatatcactctataacccataattatgtatatatgtgtcaattaaaacaaaagagaagttacattgatcccatttaaaaaaacagaatatgggccaaccttactgacttcctcctaatgaatagaatgcagtaaaagagataccatgcggcttacctatctcagactgttttcccttggaacccagcccccagattgtgagagcactcaggccacaaagagaacctggcagtgccagtgtcagtgttcatgctgcctgtcccaaccaaggttccagccaatggccagcatcaaccatcaaacatgtgggcgagcaatgcttcagaggattccatttccccaactgatagctgttcctagggaagctgaggggagtagagacgatctgtcctggccaagctttttccaaaccacaggttcattaacaaaataaatatttttcttttaagccacaaaactctgggtaatcgttagaaaaataagttttaaaaagagacaacaggaaacataacttatgcagcagaaaagagtctcctttaaagtaggatctaacacatgttgaggttaatttattgatggcaaacattattgagaagcagcagataaccaggacagagacataagctgctgaggaggaacttttcctaaaactccttcaattatgaactctgataacaaagcaagggtgtctccttacagtttcccctcaagttaggaaataagactgggaagcaagaagaagacatatggtatgaaaaaaaactagaaatacttggttacacaatcaaaatcagacatttacctgatttgaattaactaaaattctaaaagataagctttcagtatttattaatcaatctagtatttaatttttattttccttttctcaatgaggaaataaggagaacattatgaaatgatttttagtcttcacagaagtaaaataaacatagtgtgctttgagtgttaagcaatcaaatgcaatttctcctttaccttacttcaagcttgtttgtttggagaagttaagaccatcccatctctatgctataccacaagacttctctatagcacacaacttggctctgaaattttgaaagtcaaaatactaatctactatgtgtctctgataaattgcctgaacattacctgattttgaagtgctgcactcctaagaccttttcttggaatgagtcaaactttatattccaagaatcctctactgagctagaaagcagagctgtgcatctctgtttcagtaaaaggtggtcaatacagctaactgtggtttctgagaatgcaagatctgcaccaagaaaaggattagccacagtgctacccaagagaaccagctaccaggtggaaagaggatctgtgaactgcaagatgatgacttcacttgattttcactgaggaaagctggcggctcagacttaaacttctccttcctggatggtaaacatctatggaagattctatgaattataatgagttaggaaaacataatgcactaaatattagactatctcagcagatcctgtgaccaaaacttactgaaaacaaaactatagcaggaggcaatggaaaagagactaaagatttgaatggagaaaaaagaaataaagtgtgtcttataggcctggcttcccatcatgtcttagagtaagtaaggtataagctggcccagagactcctttgagacacaaaaggtgaaattaaagatattccactaaatttaatttttattacgacataagacaactggtaatatgcaacatgattgaaaaaaacttcttagtaaattcattttggccttggcataataatagacataaacaaagtaagaattgataatctaaaaataaacttgtgcatttacagtcaattgattttatataaagttaacaaaagaacaaaatcggaaaagaatagtcttttcaacaaatggtgctgggacaactgggtatccatatgcaaaaaataaataaattaggaccaaatatcttttttaaaaattaactcaaaataaaacagttaactgtaacagctaaaactataaaactctcagaagaaaacactggcataaatctttgtgactgcatttggcagtgttttcttagccatgaccccaaaggaaaaatggattcaatggacttcaaaattgaaaactgctgtgcctgagaagacagtatcaagaagtgaaaaggcaagacgctaagtagaagaaagtatctgaaaagcatatacctgataagcgacttacatatataggatatgtaaagaacctttgcaattcatgagtaacaagataattcaatttgaaaaatgggcaaagattttgaatagatgtatctgcaaagaagatgtaaagatggataatgagcacattaatagatgcttgatgtaattagtcattaggaaaatgtaaatcaaaaccacatgtggtatcacttcacaccacaggataaaatctttgttcaataaaaaagagaaaataagtgttaggaaaaatgtaaagaaatcaaaacccttatccaatgctgctggggatgtaaagtgatgcagccactttggaaaacaaactggcagctcctcaaaaggttaagcatgaagttaccctacgacccagaaattccagtcataagtatatactccagaaaaataaaaatcatgcaagcacaaaaactcatacataaatgtttacagcagcattactaatatgagtcaaaaagtggaaagaaccagaacgtccatcacctttgggtgggaaagaacccaaaagtccatcacctggtgaatggataaataaactgtttgatgtatccatacaatggaatatcactcagcaataagaagaaattaagtactgatactgtattaggaggagacagcaaaatgcctaggcagatatggaagggtccctggagaatctccaaccagctccacaagtgtttacaccagatgttaagtgcagataagggaacctggacttgtcttgcctggacatgcctgcagcagaccagaggcccacatgcactggggggatggggtggagccaccaggaattcatgccttatgcaggggaggagcctggccgcttcagctcatgtgctcctggtattcaattgtgaggtggaaacctgcttgcaggaccactctctttgctgagagctttcctttcacttaataaattctgtcctcctcacccttcaatgtgtctgcgtgcttaatttttcctggtcatgagagaagaacccagatgtagctgaactaatgagaaaaaccccacatcaatacctgctacagcacagatgcagcatgaaaaattatgctaagtgaaataagccagtcacagtagaccacttgctttttatttcagaggcttataggcaaatgtatataaaggaggttggtggttccctacggctgagggaggaagggaaaactagtgaagatggctaagtgatgtggggtttgttttcagggtgatgaaaacgttctaaaattgattgtaatgatgactgcataactctctgaaaatactaaagtcaatgactcgtatattttaaatgagtgacttgcatggtgtgttcattatttctcaataaacctgttacccagtccccccaaattaatttggtactagtggtctggagacaggtactgcttggtttcagatcactggccagagttaaagacataagagaatcaacagcatgtcctttttatagaaaagaggtttatatttttaaaactatccttttcattagtatcaattctgtaaaattaaatgaaaaatctttctttgactgcttaaagcactgagagatttatattgaggaataagaccttgttttctttggccccaatttctatctaaagggtctgagaatcacacacttcaaactattaaatctcatcagatgagttttattaactcttataatgtggcttactttctcacctgattctggtacagcatcacagagagaagaagctgaaggaaatcaaaatatttaacccccaaatatatttttctgacatattttgaaatggttgctgcagggccaagagattgaaatggccctcattaaggtagcccaatctcttcccttctaggtcttcccacatctggggaagatgaactaagaggctgatgcatttaaagtctgaaaagatatatttaccctctattttctcaacatattttggcagaatttgggtttttctattatcaatatgttcccaaattatgtgatttttaatcccaaaactgatttaaaattaccgtatgttggaatataagttattctgttataaagatacatgcatttgcatgttcattgcagcgctattcacaatagcaaagacatggaatcaacccagatgtccatcagtgatagatgggataaagaaaatgtggtatatatacaccatggagccataaaaatgaatgagatcatgctctttgcagggacatggatgaactcgaagctgttatcctcagcaaactaatggaggaacaaaaaaccaaacactacattttctcacttataagtgggagctgaacgatgagaacacatggactcggggaggggaacaacaaacactggggcctgttggggtcaagaggtagagcatcaagatcagtagctaattcctgcggggcttaatatctaggtgatggattgacaggtgcagcaaaccatcatggcacacgtttacctatgtaacaaacctgcacatctcacacatgtaatctagaccttaagataattttttttaaaaaaattaccttatgttttagtttcttaatcagaatattcattttcagttgatctgtttttaagtctccatggcaatcgaagtcttcatttccaaatacacttaacacatttattgtcatttccaggagtttcttatatctgcagaaacgtacagaattagtaagtcaaatatttttaagagtaaatatttaataattgtttaaacgatattatgttatagcatatcaaagaaacacatctataaactatgatcctttcagtttcaactgagcatagtttggaagcactctatatgaaattataatcttagataaataatatgaagaacaattttatggcatatatggcaggtaaagtggtattacaaccatacagtttttttttttgtttttttttttttgagatggaatttcactcttcttgcccgggctgaaatgcaatgctgtgatcttggcttactgcaacctctgcctcctggattcaagtgattctcctgtctcagcctcccaagtagctgggattacagacatgtagcaccacgcctagctcattttgtatttttagtaaagatggggtttcaccatgttggtcagactggccttgaatggtcagactggtcttgaactcctgacctcaaatgatccacccaccttggcctccaaaaatgctgtgattacaagtgtgagccaccacacctggcctaaccgtacactttttgtaaataaactattcatatccatgttggtatggtaagataaaataacctattactaaatataagccataacctagaaatgagtaaccaagataaaaaagtaaaacacatacatttgagaaagacaaaaaattacattttgatacccattcacagtctataagaagaaaaaaaagtacacacaaaaagcatcaaggacattattcaatgtagaaaaagagaagaccaagaaaggggcagagagatgcgtgacgatttaaagactttgaagaagagatctagagatctttgctgacataatgtcaacaaaatgaaagagatacaaaaccatgtagagaaaggcaatgacagaataatgtagattagaatcagaaaaccaatttaagtgctcagtaaataaatagaaaagtagctgtgttcagggcttcaaagacacattccatttttttaaaaaaaaaatctgtgatcaaaacatgaatgctcattttacttttaagttatacatatatttttatatatatgaaatttatttctgtaaaacagaagtttaataacatgtatacttcgtgtatacaacggaggtatctgtgtaaaatgagtaaatttccatgttttatatctaaaagaaaaagaagcaaaaacaaaatataagctatatatcaagataaattttgatgttaaagaatgacacaataggtcttctttaaagaatttgaatgcagtagaggatactacaaaaggaagaaaagatgaccacagacagcaaaaatatcttcagaaataaaaattcaaactagataatgaagagtggacgacattatatgtccaaggctttgtcattgttttcaaaatcattaaagaataagcggctgggcacggtggctcatgccactttgggaggctgagtcaggcagatcacgaggtcaggagtttgagaccagcctgaccaacttttcaaaacctcctctctactaaaaaatacaaaaattagccgggtgtggttgcacatgcctgcaatcccagctactcaggaggctgaggcaggagaattgattggaggcataggttgcagtgagccaagatggaaccattgaactccagcctgggagacagaggcactgtctcaaaaaaaaataataaataaaaatagaaataaataaataaataagtataatattttggcattcaaaaaattttcagattatgttgtttctcttttatacatattttaatacaaatttttttatcccaaccttgccccagcagctcagctgactcccaaccccatgatgcacatgcctataaagttgtgttgtgagtttctgaaatacattttaaaatagaattcatttaattatgaaaatggagacataaaatgaatttgtatctcagttttagtcaagtaaaattagagctaaatcaattaataaatgattaacatgttctacaatatgaaaaccatacccagttgcctcttcttctaattcatgattttactttcttatttgattcacattatactccagtgatgatactaacacaaaaggtttccttaattcttcatttttttcttcaggcttaaaaaaagtgtttaaaattatttttgtaaaatctagagaccctcttttatcttaaaaatattatttctcataagttgatgagtaatatgtatttaggcaggggtataaagtgcattttataagcctgatgccaataagggcagatttcagaaatagtcacttttcttaaaactgctaaaaatgatacataatttcattatattttctgaaatttaaactgccgaaaatgtttgttacaaacaagggtttttacacataaaatactaagggttagtaaaaaatgtgtagttatatttacattttactttttaaagatgctctggaaacattgtcattaatagtttaagatattccaagttttcttaaattacatctaagaagatttttagaaaactcttatctattttccattacatttttgatcctcatctgtcttcaggttgagctaaatactgtcattctctgtaagtattcacccacaggtttcagtttttccctttctcttaaccctttctctttaaataaagtttttttctataataaacaaaaacacaacttttgtctactttttgtggtttttctattatcctgtttctccccttccattggactctgtgacacatggtctcatccagaaatctatttttcatcacttattgtgtttttaatatggaaatctgatttttaataattccaataaaaaagtccaagggtcatgaaggactttatcctgctttactcagcagcagctgcgagcagtgaccaaatgttccctctgctcctctgaccccgcttcatttctaaatgcagcaacctctgttcttcagtcctattcctttctgtttgtttgtttgcttgtttgtttttgagatggagtcccccactgtcacccaggctggagtgcagtgacacaatctcagctcaccgcaacctccaccttctgggttcaagcgattctcctgcctcaccctcccaagtagctaggattacaggcgtgtgctaccatgtccggctaatttttcatatttttagtagagatggggtttcactatgttggccagactgatcttgaactcctgacctcatgatctgcctgccttggcctcccaaagtgctgggattacaggcgtgagccaccatgcctggctgctattccactttttaaattctctcaggactcctaaaatctcaaaactttgacctagattccctaatctacatttccatctctgacctttttcttgaggcctcttccttctagtacacatattatagagaatattccaaaccacacgctcagacattgctacttggtgcagattacttttgtagatagtgaatcttgtctattttatgttggttcttattgatgttactttgagtataccgttattttctaatctcaaagggggacagtctcaccattacgatattgaccagtatactttgtcctttttttctttctttcttcttttttggaccagtatactttgtccctttttttctttttcttttttttttttttttgagatgagtcacactgtgtcatccaggctggagtgcagtggcgccatcttggcttactgcaacttccacctcctgggttcaagtgattctcctgcctcagactcccaagtagctgggactacaggtgcacaccaccacgcctggctaatttttgtattttcagtagagacagggtttcaccatgttggccaggctgtttttgaactcctgacctcaggtaatccacccacctcagcctctcaaaatgttgggattacagacatgagccatggcacccagccctttttttcttttataatgaaaactttcccatgagaatcagattatcaattgtttgcctttgttttcttttaaagagtttccttttccatagagatatggcatcatgaaagtcttgttctaaagtttctaaagtttctttcgggtgacactcaaatatatcattgggaagctccaatcaagtagacatctcccttcttcccatttgagattcttcatctcaaaatggtgtccaccaaacgtcttcatccaggtagtctcttgcttagaaattcaggagataagaaccttcttgagaagttagaggctattgactgagatggtttaatgctgtcccttattatatgttttactcccaaggcagacatcaaagtggctaataatactatgcctgatgtctaactcacttctatgggaatctatacaaaacgttttatttatgagacagagtctcactctgttacccagattggagtgtagtggcttgatcaacactcactgcagcctcaatattccaaggtcaagcggccctcctaccacagcctcccaatgtagctgggactacaggcatgcaccaccatgcctctaagtatttatttatttatttatttattttttaaagacaggttctcattatattgctgtggctgatctaaaactcctgggctcaagagatcctcctgcctcagccttccaaaatgctaggattacttgcatgagccacctcccccaaccaggtgtttactggggactaacatgaagcacttacaagagtatgtggaacatagtgagctacataaaatatttgctattagcataataattttattgtatatcttaacaaaattgtgtatgttaggcaggtggcatgccaatggaagtagtctcctatagctgcactgaatcattcttctcaccactgagagttgcagcaaatggggggcacataatttataaattacttttctctgtgtatgactcagtaggcaatgactatgtatgtactacaatgtaaatagcacctcctggatggaatagtacataactgacatgaccagcagacaggctaaagacactgagctgaaaaccctgcgactctattgctaaaccaaggctcctgaatccgttccctctgagcaactgttgctgtggtgctgccttcacaagcactctgtggagcactgagattgaggggctgtgctatccgtcatcagacaagctgcagccagaactgttcagctgacaaactgggagcagtccagaaatacagtaatggctgcatagtgaaaaaaagccaatttagattctttttcatagagagaaaaacataaacatgtgattgaacaagtctcctctattagactaattggtttagatttgatatttaattgctaaaaatacatttagaatataaaccttactgtgtcaaggtctcaaagaacaaataattggtatggtataaagtatttaattgtatgctaaaaacttctaagctaaaatattttcaatttatgcaaggataggtgccatacatattatatattattgccccattaagcaaatttatactgagacaaaattatcttccataaaaaaagaaaaagccatgtaaaattaaggactaagtttttctgcacagactggacaacaattcctaacacataaggtcagtgagagtcagaacagtcagagaaagcttcataaaaacaaaaaaattgtctgccaggtctgaacgaatgagactagatgaacagaaactgagaaggcagaaaggatagcatgagcaagacaagtgctgaaatctgcccaattaactctgaggataaagtccaatggcagggaaataaaaacacatgtccacataataacctctaagtgaatgtttgcagcagcatttttcataatagctagaagtggaaactaacctcaatgtccatcaactgatgaatgaatggaaaaccagtatagccatgcaatagagtatcatttaactataacaagaaataaactaccaatgtgtgctaaaacatgcatgaattctgaaaacattaagctaagtgaaaaagccagtcacaaaggactatgtattgtctaactctatgtatatgaaatatgcagaacaggcaaacctacggagacaaaagtagatggtgtttgcctacaacaggggtaggtggagggatatggaggaaggttgcagtcatgcctaggagatgtggcattgcttttaagggtgatgaaaatgttgtgaatataataacagatactgaattgtacattttaaatgggtgacctgtctgatacatgaattatatctcagtgaaactgtttttaaaatccaatgacaggatcaagataattttctcagctctcaatttttgatgtacatactatatcagatctaaatatttctatacttttatagtatattttaaataaaaggtaaataaagaaaatgcctaacttttcaaatagtttgtaaattgacataaaacatgtacatttcaaagaatagtataatggcctttctatacaagttaacttagaatctgtgaaatagacacagattctgtgtcctttcacaaaagtgaagaaataagacaattttctggaacattccattaaacattgtcctctgatttaatctggcctgcctcatcatagcaatacaaaaattacttgaaaatatgtttaacaggaaaaaagtcaattttctctgaggaatgatgtataattatcaacttttccaagggtacatattgtaagagaaaaggtatgcaatcctttttcaaaatggtagaacaaaagtcacaatataaaaaaaaagtacattataaagatagtaaaatggaaataattaattataatgaaagtacaaaatcaagcttctgccaaaattagtatcctaaaacatgttatataattcaaccagctacagaataactgttgacatgttaaattccatacatacttgactttccacttgaaataatttcctctttgaggcccgtgtctcttccaaattaatgtgacatcatgtaccttccagtggagactctaacatagttaattttttaagggaatcagccacttcttgttgaagttgtctcacaaccacctgataaaatatttttgttactgattttataaattgccttattattaaattatgttaataacatttaactctaacatacctactttgaaaattatctcacacacatcaattcgccttcttttcatcacaggtacacatttttatttattactgaattcagtgagggatgcagaatgtgttatcctcctgccaaattggtattctcttatacaacagattcatcccaccattcaatcatcttagaagctcaactcaacctcaaagttcctaacatattcaatcaactgttcaaatcctttcaacagattcctgtctcagaataaaagtaaaattccaatggcctttgaggccctaggtaaacccctctttagtctgaaaatggggatataatgcctaactcataaatcacaggcagctacagtatctttgtactggacaaagtcatattcaaatgatagtcattgagccttgaaataaaaattatgagctaattattaataaaaatattcaaagtaaattatgaataccagtgggaagactaaatcaaatatagttttgctaaaatttaccacatttaccctaaattataattttataacaagtaggtgcctttaaaacattacgtggtcaaaaaatatgtaatttgagactgacatattttcagatttaagttaaattaatatgaataaaaataaagctataccaactaaaatatataaaaaactacttaaagcaagatattacaagacacagcaatacacttcacttcatctgggaaatctagaattaagtgttgaagcaaatcacttaattaaattttaatttgaaaatactcatttcaggtgtaaacatttccatttataccttcatcatggtcttaacatgtggcaacataaagacattaaaattattatttcagcactacaggactatctaccttaaaatatgactctgtgccgaataaaatgtcataggtgacacaaagtcttctctcaaagtaaatcatctctcacctctatggaaacaaggtatgtttctaagctgatgtaataaacacatttttccttttttttaaaatcaaaaagctttgttgaaatataatttacatactatagaatgtatctgttttaacataaagttaaaagatttttagtactttttctgagctgtgcagccatctctacaatccaactttagagcatttccatcactgcaagatccctcacgcccattagcagtcactatcagcttccagccccagcccttcacaaacattaatctactttttgtacctatatatttctcttttctggatgcttcatgtaaatggaattgtacagtatagtaaacacagtttttatctactgatttttatattcaactaggttcaacatgtatccagaaccaaatgtttaaattttctttctagaagtttgaaaatatttatcttccttgattcttactactgtttctgctttctgtctctcatattgaaagagactttcttttaaatgatcatattcattcattagcttcttatttttctcttctagtatgaggtctttctttctactctcaataaagcctctttggatattaattactgtctctttatgatcctctttctgatgaacatcaattagttgctgttcaagccatggattttcacgttggagttgacatatcctctcttccacacagttccactttccagtagatttactgactttagcttctgcactttgatacatctctttcatttcctttatttgctgctgtgtttggcttaggtcgttttgtacagtttctaaagctaatgacttttttctgagagtatctcttgtcttacggaacttatctttttttttttcttgtaccttttttttttaatgtttattgatcattcttgggtgtttcttggagagggggatgtggcagggtcataggataatagtggagagaaggtcagcagagaaacatgtgaacaaaggtctctggttttcctaggcagtgtttgtgtccctgggtacttgagattagggagtggtgatgactcttaacgagcccgctgccttcaagcatctgtttaagaaagcacatcttgcaccacccttaatccatttaaccctgagttgacacagtacatgtttcagagagcacgtggttgggggtaaggttatagattaacagcatcccaaggcagaagaatttttctaagtgcagaacaaaatggagtctcctatgtctacttctttctacacagacacagtaacaatctgatcgctctttcttttccccacatttcccccttttcttttgaacaaatccgccatcgtcatcatggcccgttctcgatggttgctgtctctttggagctgttgggtacacctcccagatggggcggccgggtagaggcgctcctctcttcccagacagggtggtggggcagaggcactcctcacatcccagacgatgggtggctgggcagaggcgctcctcacttcccagacggggtggccgggcagaggtgctccccacttcccagatgatgggcggccaggcagaggcactccccacatcccagatggggtggccgggcagaggcgctcctcacttcccagacagggcggcggggcagaggcgcttctcacatcccagacgatgggtggccgggcagaaacgctcctcacttcccagacggggcggccaggcagagacgctcctcacttcccagatggtgcggctgggcagaggcactccccacttcccagatggggtggccgggcagaggcgctcctcacttcccagatggggcagccggggagaggcactccccacttcccagactatgggcggccaggcagaggcgctccccacttcccaggtggggcggccaggcagaggtgcttctcacttcccagacggggtggccgggcagaggcactccccacttcccagactatgggcggccgggcagaggtgctcctcacatcccagatggggtggccgggcagaggcactccccacttcccagatggggcggccgggcagaggcgctccacacttcccagatggggcggctgggcagaggcactcctcacttcccagatgatgggcggccaggcagaggggctcctcacctcccagatggggtggccaggcagagatgctcctctcttccaagacggggcggccaggcagaggtgctcctcacctcccagacggggtggtggctgggcagaggtgctcctcacatccaagatggggcgtctgggcagaggtgctcctcacttcccagacgatgggtggccgggcagaggtgctcctcaattcccagatggggtggccaggcagagatgctcctcacctcccagatggcgcggctgggcagaggcactcctcacttcctcccagatggggtggccgggcagaggtgctccccacttcccagacggggcggccgggcagaggcgctcctcacctcccagacggggcggccgggcagaggcgctcctcacctcccagatggggcagccaggcagaggtggtcctcacctcccagatggggcggccgggcagaggcactcctcacctcccagacagggtggctgggcagagacgctcctcacttcccagatgatgggtggccgggcagaggtgctcctcacttcccagatggggtggctgggcagaggcactcctcacttcctcccagacggggtggccgggcagaagtgctcctcatttcccagaccgggcagccaggcagaggcactcctcacctcccagacggggtggccgggcagaggcgctcctcacttcccagatgggacagcctggcagaggtgctccccacatcccagacggggcggctgggcagaggcgctcctcacttcctaaacagggtggcggccgggcagaggtgctcctcacttcccagacagggcagccgggcagatgcgctcctcacttcccagacagggcagccgggcagaggtgctcctcacttcctaggtggggtggtggccaggcagaggcgctcctcacttcccacatggggcagctgggcagaggcactccccacatcccagacggggcggtcgggcagaggtgctcctcactttccatttggggcagccgggcagaggcgctcctcacttcctcccagacgtggggcggccgggcagtggtgctcctcacctcccagatggggcagccgggcagaggcgctcctcacttcccagacgatgggaggccgggcagagtctctcctcacatcccagacagggcagccagacagaggcgctcctcacatcccagaggatgggcggtcaggcagagacgctcctcacttcctagacggggtggcggctgggcagaggtgctccttacttcccagatggggcggccaggcagaggtgttcctcacttcccattcggggcggctgggcagaggggctcctcacatcccagatgatgggtggccaggcagagacgctgctcactttgtagacggggtggcgggtgggcagaggctgtaatcttagcactttgggaggccaaggcaggcagctgggaggtgaaggttgtagtgagccgagatcccgccactgcactccagcctgctgtctttgtctgttctttcatttatgagaggaatccatcgacttgttaccttatcaatagaatgcttgttgttaacagcatacaatatacagatgatattagcctgagatatttcttgatgaagttgttcattactctgttctgcttctgagtaatctacaatgtgtgttggaactctctctggggtgacatcagctggaacggtgatttcttctgcccggggaggaacctcttctggaaattcttcactgaccagagacataatcattgatgtcttcccaactctaggttctcccaccagcaggatccacacgtctttcttcatgtcggcggctctcgggggccagcctccgcccgcacgtatggagtggactcctctcaccaggagcacccaccccacggcgccacctgccagcctcttcggctgccagggcccgccgcgctgccccctcagttgcttccccgcaagagagccgggacagcaccagctccgcttcctccagcccagcaggctgcagcggcggcggccagaacttatcttttaaagtattgaatataatatgcgttttagaaagttgttcagtaagaaactaattcttatcttctacttcggaaatatcagaactcatttttacttgttcaaaaacatcttgtgttctctctaaagcaagttttaagtttctttctgttttcacattttcactgtgtttacttatagcagcagccagtctagactgataagattcaatttcagcttccagttttttcttgctttctttttccttcaacagttcagaattgagccttgtattctcagctttgagatcattaagctcttgttgataccggaatgctgtttttgttatcatttcctcattgagttttatacaattttcaagggcagcatttgttcctttagcaattttaatgtccttaagatatttattttctttttccaggttgtcatttttcattgtgcatatttcctgtctgggtatagcaatatctgtcttcaaaatgcaattttcatccgtcagatctttcacttcttcatgattatgaaaatcctaaataaaacaaaagaaagttttagctagtactcaataaaataacatatcatgattacctctgaagttaaagaacaacctgcacatcaatgcactaaaaaggttactgtaagtggatatccaactggagaaaaagttgaagcaaaattttgaaccttatagagcataaattccaaaaagttcagaaatttattaaaagtcaatgaatttataaaagtaaacacacacaaacacatgcacaccagagaatttttaagaatttcagaattggaaaagcctttccctgaattacaacaaactcaaaagtataaattaaagcattaacaaatttgactaaattaaaatatatcaaaaaattgcatttacactttgatatctaacccatacaccaccctatagtaagaaccttagttcacacgtatttggacagataaaatttcccagagttattacagttctgtttcactgataacattctatttcaatttgactcttttaacacttttatagtcagttataagaactacatttactaactcataaatctagacattatactagtcactcctatatacattcattgatgaactcatctagttaccacaattttgagaaagaaaggttaaaaatataagcaagctacaggattttccccaggacttctgactctacttctacttctccaacagatcacagttacttctgtggtgtaaatatatccatatgaaagaaaacttttatttcaaaacaccagtggtaaataagataaaatttatagagctcttctaagaatatcatgagattatttgtgattgcaataatttctgtttcctctttataatattaggtagagtaatcaatatgaaataggagaaagtacaaggaacaattttactgggaacaaatctttatcaataggttatcactaagtatatattatggcatattattgttttcaaaagctctttgtaataaaataatatcctatgtgggtgccaagatttataataaatattaataattgtacctgtaagtgtcatcactcatttttaaaaatgacataatatttctggtttgtttttttacctaaataatatatattaaatcaagtggatattataagttacattgataaaataaagtttaaaatatagaatttttactaaagattgatttacctgatttggagtatttcttgcagtcttcggtttcatctctagtgattgaacagttggttcaaattattttgcttcaacttctttcttatattgtttctctttcctttctaattcttctcttttttttttttgtacagcatattaacatttgttttttcttcattttcttgttttaaggtgcatctgcagataaagacatttatcttaaaattcattttgttaaaaaataaacagtttatcctgttatctacctctgcagatattgtttgttatcctaataaaatttctatgttctggattatttttcctttgcagttctcagatatttaatttctcacttcaacatcttcaaaagaatgcatatacttgaaaagtagtaaggaaagaatattctgctaaaggttttattactagtcactctagtatatattttaaaaaaggatactggagataattcagtaaagttacaagttcaaaattaccttttcaaatcacacagtcataattactccctaattagaaaaggtcatttacaatcaactaaaattttaaagttactatttattgacaagtgtataagttcactagaaataaattttcatctttatgaaatattgcgggtgtctctccaaatgatttacagagtaagatgtctctcacaaaaactatatctgcaaatgactgtcatccaaaactaggctaaagagtctaacatctgttaccccacactttttataattctttcttaatacttccaattcaccttcttattacatatattttatatatttattagcctattgttcattatgtgtaatatataattaatgcccttaataagtgtgtgtatgtttacacaagttatgttttcctgggaaatctagtcccagaagtggagttgttgagttaaagggatgtcaggctatttgaaattttgatacacagcactaagttacccttcagaactaatttaccatttcatataccaacagtgaatgagaatgcctttttcctcacatttgccaacacgagtaattactttttaaatatcagcatgactttacaaaatgtatcttattttatgttaatttacatttttctggttaccaggtagggataaatatccctggtaaaaatataaaatttgttaatcataaggaatattagtcccattttgaattagtttatagcacaatgacaattatctcctgtgaaatactgctataggtggcaaggcacagtggctcactcctgtaaacccagcacttcgggaggctgagatgggcagaacacctgaggtcaggagttccagaccagcttggttaacatggtgaaacctcatttctactaaaaatgcaaaaaattagccgggcatggtggcacatgcctgtaatctcagctactagggaggctgagtcaggagaatcacttgaacccagtaggcagaggtttcagtgaggcaagaacacaccattgcactccagcttgggcaacaagagagaaactccatctcaaaaaaaaaaaaacccaaacaaaacaaaacaaacacactgctataggcttacttacctatcatgctcttccttcagtttcttgggaaattgctgaggttatgttttcccaatctttctttgttgggttaatctgtcagcagcagaagaagatgtactatgacatatattttctgatagttgtattttttcacttttgtatgtattatttccttctttgacctttaataaaagtaatatgaataataattattattttatttaataaaaagaacattttccctgattttttcacttgattcaggttaactatcaccattttaatgataaaagtattttgtgcttactttaattttatcattatacataattattataattataaggtactcatcattttatcattgaaatttttgtcaagtctgctcatttctgtttgagtgaatggaagaattttccaaaattttaaaaagtcctcttctccattttgtgcttttattcccatccactctttgctatctgacataaatgtttatgctatctgactagcagaaacagagaaataaaaagacacaggtataacatatgtcttctgtctttaccacgtggattttacatgaaatagccagattaagaggatgtgactttgtagggcttcaggaacagtaaagaagttttcccttttctgcactaagctattcttttccccagtgccttttatctctctctctctcttttttttttttgaatcctgggatatcaaaaaagtaaaggttctccctgaactatgggaaccaaagtttgccacaacacaagaagcagagtgaaactgctgagtttctagtgcagaattatggaaaatgagatgcttcccagatttcacattctattaccacagaagtttataggtgaaaacctttggtacagttacctactttagccccattatctactgataatgggagtcaaaccaaccaagacatattaaatgtttcatccagagctcttgaggtggcattccctagtatttcatggcaccaaataacatgatacaattccatattgctgaattacataaattaccagataaatttatcaaattagtcagatatattaaaagtctaacttaagcaaagcaatttaatgcctcagagggtggaaaaaggcctcatctgctttcactttgaaagaagaaaatctctggatttttgtctatctttagaacacaatgtacagaactcaactttctataaagagtcaaaggctaaatttttggctaagaaattatgcttcttacgtgataaaaatcatacatgccaaaacttaccatactttattaaacaacataatgtaaggtctgattcaacagaaatattggagagtggtgattttttaaaatatgtggaagtatatatttgttttcaaaatattggaaataaccatgatgggactataagttcaaacagtttgagctaagcagataaacttgtgcatgaaaacacattaaacagactcatttggctgggaatatccattgcaactctcaaggctagacgtgtttttgtggctcatctcagtcattgcttccctcccactgtattaccattctatcattaaataaatgtaattcatctctaaatgaatacagaaaaaagaatctagaatctagagcttatttctttagcaatttctttatgttgatctggttcagaaggtcacatggtatatggctgaattagtttcccagctcatatgccacttggaagactgatagggagacttaggttgattaatgaacaaacattatgagaacattctccagaatcgttatttagatagcaaaactaatctactttgacacataattacacatttagataaccccactgtaactgtacacatgagattttcttgaatagaaaatctgactgaatcaaataattgataaagagaaaaaagaagcagcaagtgaacctctgtctttttgaagttggacttcctttctccaaagctaggaactctactggtaacatgctacctcattcttttttactattattatacttaaagttctggtacatgtgcacaacgtgcaggtttgttacatatgtatacatgtgccatgttggtgaccttggaatatcttgctgtgtcttctagctatatttttgatgttctctcactatgtggcaaagaataaacccacattttataattcaagattcatgcttttgtagttattagcactgggattgtcatatagtggcttctggagtaagcactgtattggttttctgtttttataagtgtctgtagcagcagaaatactgtggctttctatctgaatcatatgcttcatttctttgaggtaggtaaaccacaaatcaaaaagactttctggatctctagactgaggccaatgactaatgtctaatttccaattagtggtatttgggtttatattttttgccatttgcatgtgaaactcttaatcatctttcatttcaatcataattactgggttccttaatgtttcagtttctgtatcataacaaaaattttcatcatctgtgttagaaacaagctatgtgtctggtttgttatcatttttatagtctgatttattttcatttaaatgaagcttagaagatgactggtaagtgtatttcagggacctggagtgtgaatggaataaaaagacatttgacatgggattcctctgttcaggcgctgcctggaatgccacagagttagaccctccagatgcatttttctcctcacaatcagggacctgattcatcagattagagggcactcctttttcgttcgtccctctttagagttactatgtagaagctcttcctcagggcaagcagtaattttggagttttcaaaacttttaccaatattcagcttgaacttgcttgtaatgaattttaaagaaagtcatgaatatacagatagattccctttatcacaattcttacccagttctggttcttgaggcttttctttttttttttttggcaggtgcaaaaaggaaaacaaatttgcttgttttgtttctcagatgtcttttctgtcagagtgcatgttctaaaattagctttaatcaagtataaacaaagaaatattagaaaataattaaaatttaactgtgaaacttaatctgtgtgttgcccctcttaaattatgggattgtaactaaaaagtgaaaaataatttgccttggcttaacacgggacagaaacataaaccggcaagctgaactctcagtgtttgtttggactaaacttaatgcattatgtgtaaagtctaccagaaatgaattcaaagatgataggtagtattataaaagcttcctctcttacaaagagtttacctcggcataccagaaagagtgagcccctacagtgcatgtaaatttctgaagattaactagagactaggcaaacactaaattattaagagccaaactgaacaacaataagaaagagaagcaaaattttaaattctaattcaaatgatatactatgatagtgttatgtatctaaatagattttctgctcatatccacttctaatatattttaagttccactagtgatagtgtttggatttttttaattttagtaatatttactatgtatttatgttgaaataaagttattgtttgtaccctgataccaaaggtcccattctgcaaggtaggattctcataaaaggcaactgggttgacttttatgaccccattcactccctgaacacagaagtcaactggcgaccacaaaacagaataaatctttaacctcggcactggtgaccagcaatataaaactgcaacatttgaaccactggcaatgatgactcctttaacactagtttaactcagtggccattgttgttaaattgttcataatttctattccttagtaatatgacccaatatttcatgttaccttctgtattatgagtaaggttatacaaataaaagagcaagataattgtgaaaaattcttgcctcaattccaagggtaaagacagctatgagttactagagatagtaagaattactagaataacgaatagttactagagatagtaagaatatcttaagtttcataactggttaaaatgttttaaaaattaaatataaaattatgacctattggattctaaaggtatagtccaaaaggtcatgtcatttggactacgctttgttactaaagcaaaaaaaaaaaaaaaaacctaatattaaacaagaaatttaaattttcatatacctgtggttgcttcttttcacttctttcacgcctttgttgctcttcctctgaagccactggtaaggctttttctgttgacaaattcactgttttagttcaaatgaactaagaacagttagataagactataatctttataaaaataaatagaaaataatatttctttgtattttatattttgagggtttaaatgaagcttaaggtttactgaaatatttacttctttaagaaatacttctaattatccaaaacttcaacaaaccacttggggagacactagatatcaccaggttcaagccatacaaaatctcagggtcactcacaaattgttccacccaacataaatcaacaaaactgttggaaacaaaacaaaattttgaaatacagtcaaaacatacaatgtacataacagtatctttttaacaagacactaattgagttggcagttactaataatttgcaaaattattgttgtttatatcttagtgtgcaccccattttttacattgcaaatgttttcccctgctattctgaaaaatttattttcatcttttaagactcagaaagtaggctggacataatagctcacatctgtaatcccagcactttggaaggccaaaatgggagaattgctcgaggccaagagtgtaagaccagcctgggaaccatagataactttgactctacaaaaaattaggcaggtatggtgatatgtgcctgtagtcccagctactcaagaagtttaggtgagaagatcccttgagcccaggagtttgaggttgcagtgagtctcaatcacgccattgcactccaccccgggtgatagagtaagaacttgtctccaacaacagaaaaagaaaaaaaaaaggctcagaatgctgtgtgaagtcttctttgattctagctatctttctccacacacacaggtgtctgtttcattgcggtcccttagtactttgtcaattttcctagtgtcactttaccacctgaactgcacatcatgtctttacatgtcgatcccctttgctgctagactgtagaggacaatcttttgaataatctttgtataaacagtcttaattttgccaaataattagttattgagctcctgctaagtgttaggcactggggtataaggaaggaacataaaagctgtcagggatggctttcctaaagattatgtatgagctgagacttagagagtgaggttagccagattaagtgaggcagagggcaggaaagggtgagcacatgccaggcagcaacaagagagggagagaagcttccaagagagtatgtatttctctgcaaaagaggaatggtgagggggccattaccagcagctgagtaattccagagaaaaaggcagatggggaaagggctacggatggagatttgggcagaaatcagtttccttttcttttctttttttgggacaaggtcttactctgtctcccagactggagcacagtggcatgaacttggctcactgcaacctggtctcctgggttcaagtaattctcctgcctcagcctcccgagtagctgacattacaggtgcgtgccaccaccacctgctattttttgtattttattagagatggggtttcaccttgttggccaggctggtcttgaactcctgacctcaaatgatccatctgcctcagcctcccaaagtgctgggatcacagacatgagccaccatgcccaacccagaagtcagtttctgaaatctttatataaagctttaaggtgcttggacattaggtattcaggagtggttcatggatctatttacattagagataattaactctaaatactgtgaggagcataaaattctgaggcatataaataaatgaacaaagataaaatataaggcaatgttgcaaagatgatgcaggcctgaggagatgttttcagaaatatttaggatataggtatcagtggccattataagaatgaatttttattgaatgaataaatgtatatatccaggtccctggagaaatacactctgctcattactttacaaattttatcaaatgagaagtaagataatatacataaactgtttcagttacttgtatttactttacactttttctgtttcagttttactgtgccaaggaaatgcatttgggttttgtggtggtggttgttgtcattgttgttattttttgagatggagtttcactcttcctgtccaggctgaagtacagtggtatgatctcagctcaccacaacctctgcttcccaggttcaagcgattctcctgcctcagcctcccaagtaactggaattacaggtatttgccaccatgaacagctaattttgtgtttttagtagagatgggttttccatgttggtcaggctggtctcaaactcccaatctcaggttatccacccgcctcagcctcccaaagtgctgggattacaggcacaaaccacggcccccagccacatatggggattttgtttcaaaagttctgtttcctgtatctaccaagctcatgagaaaatagaagcaaacaagtcatttgcataggtaagaaactttggatttatagcttgtcatcactactctagaagattatcatcatgttttataaaacaaaatgttaattctagacataaggggaaaaagaaattaaaactataggggtgggggaaaaatattgcataatttattactgttgacctgatcatatgactgattaagggcactgaatttaacttgtatgtgaagtagaccccacattagctgcagttaatcagtagaccaggtgttctagcagaattaaatttgatgctcctgtgttatctttaaatgacacagctcttctaaaacccatactcctagtgtatgattatccattaagacaaggtgatggaatgtgtgaatacagctgaggagacaccacaaggcaaatgctcaatggttcccattaatattgggaaaatcaacactataaaacagaaatccataggcattatttaatatttggttttggaaggtatttttagtgacactgcatacagttgtactgaataattgcaaaattagagatgtaaaaataaaacaaaggcacattgtgtttgagtagggaatctgtagatgtctagctgtttttcccatcctgtcccaaaattctaaatataatcatggtacccacactcaaatttatgttaaataacaacctcaatgaaattactctttctcttcattctctttgttatttatatgttgctttccttaagggaagaatacaaatgccttgctaagaagcattctgtttggttgtaggctgcataaggggagtaaacacaaagtacgttggaccacaaaatgactttttaaaagtcagaactatggtagcatgaagccaactgaggtaatctagaataaaattttctatgcttctttcccttctttgctctctttctactctaataactgcgattcatgcaggtaatgaagagtataattccctgatggaaacacagctccaaaattaatcctttctttaactatgaagttcgcgtgtccaaagtctgtagttgctgtctgatttttgatcacggatggcgatacagatatttatcgtcaactcacaacttcccaaatctttgaaaagtcttactattgatggttcaactagtagaaacataatctaaaatatctgaaaataaagtttttatttattagaatgtaaatagtaatacaaattgtaataagttttaaaagttctttcttcactgaagcagtaccatgttgtcctctaccccacaaacacaccactccctcatggtctaacgtattttaaaagtcctgtaattgctattaactcagacaagtttacttaacttgctctaagcttctgttatttactacaatttactttcaatcactcaacgatctctattatatatgttgttttccatgagaaatttgtttattagtaattaagattcttcagggataagaaaatatttgaataactaagtttgtgcataaacacaataaggtcaaatacccatgacaatattgtgtgtttctgtgtactagagacaaaaacttcaaaaaaaattttaatgaataaacattaaattaaaaactgctttcattaaactgatataatcttccctcaatgcatgaataccttcagaattcacatagaccaaagaattgtataaaatataatagtcttaaagatcttatttgtagctggcacagtggctcccgcctgtaatcccagcacattggcaagccaaggtgggcagatcacctgaggtcaggagtttgagagcagcctggccaacatgctgaaaccccatctctaataaaaatagaaaaattagcagggtatggtagcacgtgcaggtagtatcagctactcaaggggctgaggcaggagaactgcttgaacctgagaggcagaggtggtaatgagccaagactgagccactgcactccagccttggtgacagagcaagactctgtctcaaaaacacaaacaaacaaacaaaaaacataattgttcccatataagtctatgttcacaaaagatctgaagagtacacaacaccgtgagacaggacagacatatattttaaaagttatattcctggtttctgtaaaaataaaatggttgaatttaagcttttaagacaagtcaaggaaaagagcaaaaaatgcaaaagtgaaacttgaaaggtcatttccccatcaagggttcatgatcactggacattcacaaactatattgttcaaaacattagttctgaattttgatctgagtatccctggagtttcagtttcattcaaggatgtccaagaggtcaaataagacaatatcatttgctattttcagttttcttttctgagaatagcacagcaaacttcttcagagaaatgaattgtcctaacttcataggctaaaggctcacgagtcatatttctaaggacatttataaaatatggtggtgcatgcttgtattctgaacttttcaactttaaactctcatatagtaaatattaatagatacaaactgattaaagaaaagccctcttactctgacattatttttatttttctttctttcttcatttatcagcaacaggagagtctaactaaatgtggtaaagtggtataagagaatacaatgaaaagtgtaaaatgaattaaaccagagataatcatatcaatgtgggtacatctggaaaatataatacaaaatacaccaaagaaagtggcagaaaggtatgtaaagtgtataaccactcacataccattttaggacacaaataaaaaattctgcatattatttctgagcatcacaatatagttaaagatttcaaaagggcattgaaatgaaaaacaaccaacttatgatgttggtagcctctatgcaaccatgtttttaaaaccttaacaccaaaaagtctcaaaatcaccattttaaaggaccgtgtctaccagttataaatgaataattactttcctcatttttcatagtcaaagatgccacaaacacacacatacagacacctatacatacacatccacacacagtcttgctcactagaacatctgattggcttcagatcatcagtgtaataacactagcagcacgcctctaaagttaaaacagaaactgacacgttaataagtaaagctttcctctacataaagatcagaactccaactagcacataaatcaatggaaatatcttagagtctcaaaattcagtgctttgaatccctgacaaatataaaaattttatactgaaaacttcatgctattcaaaacattaaaagagaaacatctgagttaaagcttacatttttaaaatctttttatgcttctaaatttatttttattcaaatatggataccaacaataatatttatgtcaatgccttccattcaattttgaacaaacagaattaggggtaagaataatgtgagtacttccaatcatttaatgtacttatttccagcattccatttgtattgaatatgtacctgctctcaatgtctgtacattctttctttgtactgctcctttcacagcaggatcttccatttcagtgctaggctgaatgggttttaaaagaaaatgattcataaatcatatatattttatacaatgtggagttagtgattcaaaaaatatacataattaattaccttcaaggaaggatgttttgcaggaggtcctacaaagcaaaagggatatgtcatcaattatatgtaagtatgacagggccaaccaaacactcatgcagtgttactatcgagctgaattctcatgcctggctacaaaaataattacttaaagttttgagggttcttcttggcttcttcttttcattgcctaggacagcaacatgacagaaacctaatgaggaaaataggaatacaggattcctaaaatgcacagcttacatttcagtagtgagattatgtttcaaatgcctatacctaaagtagaaaagcatggatatcaccgtgaacatgtgggctaatgagaagaaaagggaccactaaacagagtagcaaatcaaacctgggggaatcgatgtccaagctgatggtgaatgtacagagtattttaactcaacacatcagaggcattgctgccagcatgtcacagacaaattccccttgtgctgtcacttaggaaatatacagttgggatgacagttcaggtgaatgtgtgattcacctctcatcaaagaaagtgttctacattgatcagctaggatacacacttatgaaataacagctaatcaaactactcatttttcccatgatcacatgggctactgcagcacctacatttctcctatcccctcatttggccttgagttagagctccttgatccacttgtgtgaggtggtccataaaacacatcaaataaaccatgtcgaataagcttccgatatcaaaatatttagcaaaaaagaaaacactgaattaccacagacttgctggatacgaatacacatttatatttcaaaatcagtgcagtatttattgaaaatgagaattttggtattcacaaatgaattttataatacaattgcttctaaaattaactaagtttggtatatcatcttacactgtaaaggacttttataaagcagctatcatatcaaagaactggctgtctcaaaaaaaattagccaaagcatctatatgcaacttaatcacatcttattcactcatgtcaatgaaacttctctctctgaggcctgaaaattatgaagtgaaatgagctgctgtggtttaccccagttctagcactccctcctgcctccagtactctccacagcaataacctcttttgtgagactgggcatatgctgaagcaactggaagtgagttgtctcaagtttacttggctttaactcccaagaccccagcaaatgtctttctttcctccctctgtgtcctttcacaatccctcttcctttgaaaaagtgatttttagatctgtcatcctgatgcttcccttcctaactgctttttatggataattgtgacaacttttttcatctgtattcagcagtagtatacacctgtaatctctcttttttcatctcattttccttcccctgtggctagaatcatgctcagaaataaaaggaaattaatgctttccctggattctgttattattcaaattgctctccagtggttctttttccagatttctctaaaggaaggctattcccttgctatttagagctgtgtccaaggaccagcaacaacatcacctgagtactcatgagaaatgcagactcccatacctgctaaatcagaatgtgcagtttccagaagctcctcaactaattcatgatgatctgaatgccctgttttacactttatgtgattccatattagtttaccctaattgccctttttggcctagcctcaatttcttccctattatgtctctgaatttaatactacattataagccataatgtttctaatgaacttttaatcaggtaataccttctctaattaattacttctccatacatcacccaacactattcttttcaattacgttaatttggcctatatgatactatcctatgaggttacactttctttaaaaccaaattatagccatatatggctgaccatttatggtgatgttcatctatggtagataaaacacaggtctgtgtggtaaaatacctcaatccttaatgcctccccagtagtgaggatgacagcaagagtaggaaaatgttactctaattctctgacacatgttggtaatggaagttcactttatcttccttcctatttctaacaccctgttcttccttcttctacagatcaatgtgactttactaccctctattacatacttccacatatgtgtttttatttattccatgtacactctgccctcctcatctctctttctcttttattcatttcctcttccctctctcctgacttgccttaggtcttagagtatcttaaaatggaactcacaactcagctcctttagtggtactcccaatagaatcaactgctgacccttggttagagacacaacttatcaccatttcacttctcctttacttattatatagttaataggacattttctttgctgttagactctattagtgctcatattttcaaagaaacattccgtcaaatggcttttttttttttgagactgagtctcactctgacacccaggctggagtgcagtggagcgatctctgtttactgcaagctccacctcccaggttcacaccatcctcctgcctcagcctcccaagtagctgggactacaggggcccaccaccacacctggttaattttttgtatttttagtagagatggggtttcaccatgttagccaggattgtctcgatctcctgacctcgtgatctgcccacctcggcctcccaaagtgctgggattacaggcttgagccaccgcacccagcctccaacaaatgactttttaaataaaatacagttctcaccttctccttttccattgactattctgtttccttttccatgggaaggtccacgtaaaggctctgacactttcttggggacacactgctaaggtagtatcaagaattagtttccattttaaaattataatgagttgcatcaagagtttcttgtcaatctctttttatgaaactggttctcactctgtcaacccagggctagaatgcaggggcctgattatggctcactgtggtctcaaactcctgacctcaagcaatcttcccacctcaacttcctgaatagctggaactacaggtgcataccatcatgccatgctaatgtttctattgttatctttgtagaaacacggcctcattatactgcccaggctggtctcaagctcctaggctctagtaaatcttcgacttctgcctcccgaagtgttgagataagcagtgtgcaccacaacacccagccctaatcaatttatttaaatcagtttcaatgttgcccaggcatagtggctcacacctgtaatctcagccttttgcaaggccaaggtgggtggattgcttgagttcaggagtttgagacctgcctgggcaacataatgagaacacatctctacacaaaaaataccaaaatgagtcaggcatgatggtgtgtgcctgtagtcccagctgcttgggaagctgatgtgggaggatcacttgagcctgagaggtggagactgtagcatgccaagatcatgccactacattgcagcctgagcaacagagcaagaccctgactccccaaaaatatcaatttaaaatgtgagaatgaagagagatacaaacaaaaaagaagcctaattggtcaacgaaatatgagcttaagccaagaaagaaaagaaacaacatgaagtacaataaagtacatggggaaatagatctataacagagctttttggtctttcatatccctgataatactaattaatatttatgctacaattagttttttgtaagtacttctgtgatagagtttattactataagacattcaattagctaaatatggtcaactaccactacctgaaagaacattattataacagagagagaaaactggaactttccatcaatgttccacccagaaaaagaatttgtcaccagaattctaaagagtgatgtatggcagacacatgaaaaaatgctcatcatcacttgccatcagagaaatgcaaatcaaaaccataatgagataccatctcacaccagttagaatggcaatcattaaaaagtcaggaaacaacaggtgctggagaggatgtggagaaataggaagagttttacactgttggtgggactgtaaactagttcaaccattgtggaagacagtctggcgattcctcaaggatctagaactagaaatgccatttgacccagtcatcccattattgggtatatagccaaaggattataaatcatgctgctataaacacacatgcacacgtatgtttattgcagcactactcacaatagcaaagacttggaaccaacccaaatgtccaacaatgatagactggattaagaaaatgtggcacatatacatcatggaatactatgcagccataaaaaaggatgacttcatgtcctttgtagggacatggataaagctggaaaccatcattctgagcaaactgtcacaaggacagaaaatcaaacactgcatgttctcactcataggtgggaactgaacaatgagaacacttagacacaggaaggggaacatcacacaccggggcctgttgtggggtggggggagggggaagggatagcattaggagatatgtctaatgtaaatgacgagttaatgggtgcagcacagcaacatggcacatgtatacatatgtaacaaacctgcatgttgtgcacatgtacccgagaacttaaaatataatagtaataataataataaaaggtaatgtatggcttgaaaaggtatatttaatagaatgtgagttgggactaataaaaagcttaagaaatgttaatcaaaaatctcaatgttaagattccagttcaatgatactagaaaatatattgtaaccctctttgctactgatgacctatttctaatttatttcctttttaattatggcataatttttcaacataacacatcaaaacttatatgcccttaaatattaaaaaataatacaaatgtaagcaatattttaaatacaatatttaattgttagatacattaggtatattatattacttataacattccattatataaaaattcatttgtgtatttattcagattaaacaactattaaggctgaatgtctcatgcctgtaaccccagcactttgagaggctgaggcgggcagaacacttgagcccaacagttaaagaccagcctgggcaacaaggcaaaaccctgtctctacaaaactcagccgagcatggtgacacaggtctatggtgacatagctctattgtttcaactacttggatggctgaagtgtgaggatctcctgagcccaggaaatggagatcggagtgagccaagatctcaccagtgccctccagcctgggtgacagagtgaaaccccatctcaaaaaacaacaagtaaaatgtttcttacatggaagactgtattctaggtactccaggatacacacaaatatgtttactgacctccagtagcctatagtatgcaggagcttccaatgattatttaaacaactaaatagaaaaccttctgacattcaaaatttcagaataggatataaggactttgagtggttattttattttttaagatgtagtctttctctgtcacccaggttggagtgcaatggtgcgatcttggctcactgcaacctccgcctcccaggttcaagcgattctcccaccgtggcctcctgagcagctgggattacaggcatgcaccatcacgcctggttaatttttgtgcttctttttttttttttttttttttttttttttttagagacggtttcaccatgttggccaggctgatcttgaactcctgacctcaggtgatctacccacctcagcctccaaaagtgctgggattacaggtgtgagccaccatgcccagccaagtaaatattttaaataaactacaatgacaaaattatgatgataaagtcttaccatattggtattaagagtctctgcttctagaactggttatttgcagcaaaatacatgttattcaattagatgaagtgttttatataaactcttcatggacaactcataaaacacacaaaaatccctttgcaatacaaattttgagaacataaatttaaatttctacgtttccacaatttatatttttaaatcagatacagtcttgttatgttgcccaggctgttctcaaattcctgggatcaagcaatcttcctgcatcaaactcccaagtagcagggactacaggtgtacaccaccacactcagctatttttctacaatttttaatattattttagtcccactacagaaccagtaatataagtagagaaacaatctctcctaaaaactatatgataccaaaataataagtttccaagaacaaaagctatatgctatgtgctgaacctttttgcaactaaaagttaccaggaggattccatgattactgcaaataatttgatccactgaagagttatacaggcataaatattatgaaagtcacactcatatgatttaaaagtcaaagtattagtgtttatccaaataaagcttaatcaaatttcatatttcctctattggagaaagcatttcctaatgtgattttcctgtcactacttattttccagttcattttttttcagctcctaacctgtcacagtacttatcaatctttgttagttaccaaagttaaacacattttttcaatcaactagccatatatatgtttttctctgacccactttccattaccaccataaaacaatgaaaggtaaaccactgctaagtttgaaaagtaaatactatgcaaaactacattcagagtgagaaaattaattttacaagagaccactttaccttagcagcaatactcaagactttgtcatccaatgcaggcaataaatccacacacagttcatggaaaatgcttcagagcaaaaatacacaatgaaaatgagcaagttgatttctttacaattttttaactgtcagtttatatccagcttccccctcaaaaaaggaaagaataatctggggaaaggtcagtgatctatatattaaattatgattcttgatataattaaaatatgtcctctgttctaaaaatagattttagttacatatttctgcctccacctgtctaaatctataaaatattcaatgaaaactaaccttcagcttcataacgaatagtgacagtcaatatattggcagagtctaacaataatttgccctcacaaattatctgtcctgaagctgaacttaaaactcaattaatggacgacataaattctgttacctaaactggaagaaaattgatgacctaaaacaaggtagaaagatccagtgtctcttttccatgatctatctctggttaaaagactaatcagcatcacttcaaaatggcagtcttgattcctcaacatggaacccacttacgaatgtcctattgctttgccctaaattggtacaggaaatcccatgcaatatttgaaaggtatgaaagccacatgtacaaaaatcaaataacaaaggtgtatgttcttattgagaatacttttcccagaaatattaaaatattaacaattataaaatcccattattttcactctataggtcctactttattcaggtccacataaactagcaagcccttaaaagttttcataggcactcagacacccaaggagagagactgccagaaaaacagagtcctggtagttgtacctctatttccctaagtactatctaagtatctgtcttcctatgggctcccacttccagattctacttctgcagggctccacagaagtctccaatcttcaaatcttcagcctatgaaagcacagattccggaaaggatggcctcaaatgaccaggagtaggagccctctataaccctgctcctgaaaaataagccaactggactctccatcacctgcacccagcatagacacactaccaactacccaactgaactccatgactggtttgccagccaatcatgcccctgacccagcctacatggacatgggaaggatatcagtgaatcgggaacagaggcagaggtgaagaggccacctgtcctgggccacacatctatgtagtccagcaatctccagccccttagtactccaagggctctaagccacccctctgaaagtcaggacagaagtagatgacaccacatttctatctgctgtagacactcctcccagtgtctcaaaatgttttagcatctttcggtaaaattcttcaagtttgtcagtccttgatttaaaaaaaaggagcaaactttttagagctcccttgaactctttatcaaacttctcataaaccctaatattttgatctcttattgaagagtccatactcctatccaatccagtgttgtttctcttcaaacttggccttcccctgctcattccattcttatctacttccattgggttcgccagctaattccattttcataccatccactgggtgcaccggactcactcccatttgtattattaaagcacatgcaaataggatataaaaagaaggaagagtactgggccttaaaatgagttcaaatctcatttctgccaattcctgtgtctaaaaaaaaaagcatcctaatctctttgagcctcacattctctgagaatcacttgaccagaatgttcaatacaggtaaaaatactagaaagtattttaattcattctaagattccttaaaattctgtaattctatgtcctcttgattctgtctataggaaaactgggaatacatacccagcaaaatttgaaaaaataatagaacaaaagaaacagcaagaaaagcagagaagaaaaatcaagacaagattatacaaaagtcatggaaaaagaaacaagacttaaaaaagtattatggaagtagcagaaatacttgcctaaatggaaaaccaaactgggaagtcaaatgatttctctctaagacttgcctaaacttgcttttgtaaaacttacagtcctatggacaaagctaagtcagatctgccctaaagcctttgatggtaaaaataagatactggctaccactgaaattgtcaaatttattaggacaaactcttcgactaaccacatttctaacaatactttaaatgagagtttaaggtatttaaggtatttaaactctcattaatttagagattaattaaattaatgaatctgattaatctgattcagacctataccttgatccaagtgctgcacggatgtctaccaatctatgctgaggagcaagagaagggatttggaagccaggcaggctgacggtcaaactgtaggccagctgctttgttaactatgagtttataaggcaattaatcaactgctgtaatccatagttgtttatttaataaacagtaggttataggaacacagatgttgtgatggctttatgagatgataaatgcatagaagatattaggatgtctagcccagaatacaacactcaacagatattagtttcttccatctatattttcttagttaacataattttttaaatctataaaatcctgactgcagactcatcagaacttccaacatctattaaagaaaaaggtagaatgcattttaaatcaataataaatgcacagaatattaaaagcataacaatgcacagtgatgcatgcctgtaatccaaactgcttgggaggatgaggcaggaggatcacttgaggaatctagaagtttgagaccagcttgggaaacatagtaagacactaccttcataaaaaaaaattgtgcacacttgtgtgtatgctttagatcctgtttttgttgttggtggtggtggtggttttgttttggtttgttttttaaaagcataagactgatgctttgttacaaataattcctttgggagcatgcctgggaccttattagaattaacattaattttacctattggtaggtaattcatgcagtaagaactcttccctttgtatttattagatgcaaagaagaataactttattaaaatttggtatctacaagtgaactgcagtttacaagtcatcctagccaaaccctatgagattgagtaaagatgttattgttagcagaacaggtgtgatgagtcaacagtgtcaaagagaatgatttctggaccaaaatatgaggagcagttaaaacagaggatacagtagtaccccttatccactatatgtgagcaaagacatacttgacatgtttttctctgctctcacaccacagcaacaatcatcaacaaagaaggcttctgtgaccaaatgtgtggagagttttccccaccaacaagcaagcaatcattcctgctgatggcacaattcaattctcacaccctatcttcagattacatcagatttaatttataaattaaactttatcatagatatgtatgtataggaaaaaacagtttgtgattcagtactattcatggtttcttgcatccactgggggtcttggaatgtatctcccacaattaagggggaactactgcacttattttgttataacacaacacagcctctctagctcttcagttcaaactgttcagtttaggataaaacaccctatcaccagaagccaggaaaacataggaatcagaccagaaacaggaatccttgcaaaaactttccagctgccagtggagaagatctcaagagagatcactgtgttactctggctaatactcttctggggaaggtgctgggtggtttccttagttgtagctatttgctctgccctacatataacaaggcccatgttcacctgccattttacctcccacagaaagaaccactggaaagatcactcctttaagagcttatccacattcagagagaagctgaagaaacactggggaggtgtggcagggtgctgggcagtattatctcatgtgaaaaatatatagaaagaaaactatcaatgcccttttactaccggaatgttccaatgcttgccgttctccctagtaggagaaaaaaattctttttcacctcacataaagcaaaactcccttgccatccctcataacagaatctagttgtaggtgagtcatgtcatcataatacaggctgttgtcaacctcatccctcaaaggaagaggatcagtgaggaacatatgtattaacctatagcattcactgcctggtcttatttccaaccgaaggtaagtatgaaagactgtgtgattccagttttataaagtacaaccccttgcgcttgtccccttccattgctagacagtgtatctggacccacctcacagagcaagatgctccagtttgtgctgtgtggtacggcatggtgtccttttcctcaaccctttccattatgtgccaaatatctatacaaatcatgttttctaagtatgtaaagcatacctcatcagcatatatcattctttacaatgataaagaagcaaaagaaaaacaaaaggacaaagagcatcttaaatgactaccttcaattgccatggagctttaattttcttaatattcaaaaatatatccacagtattattccaactatgtgactcttctgaaaaaagtaaaactatgaagacagagtaaacatcaatggctgccacgagttgctagggagaaagggagagatgaacaggcatagcatagagaatttttagggcagtgaaactgttctgtcaataatataacagtaatagatacatgtcatgtcattatacatttgtccaaattcacagaatgtacagcatcaagagtgaagcctgatgtaaactatgaactttgagtgattataaagtgtcaatgtaagttcatcagttgtaacaaatgtaccacactctggtggaaaatactaataatgggggaggctatgcatgtgttggaggcatggaatatacaagaaatctctgtaccttccctcaattttgctgtgaacctaaaactgctctaagaaataaagttattgatttaaaaaagatattcacagctgggctcagtggctcatgcctgtaacctcagcactttgggaggcataggcgggtggatcacctgaggtcggcagttcaagaccagcctggccaacatggcaaaacctcacctctactaaatacaaaaattagctgggcaaggtggcaggcatctgtaatttcagtgacttgggaggctgaggcaggagaatcacttgagcctagaaggcagagattgtggttaaccaaaattgcaccactgcactccagcctgggagacagtgaaactccatctcaaagaaaaaaaaaaagatattcactgtttatgcaacccaggatctccagaacaataattaaaataataatttaaaaaaatggccgggcacagtggcttatgcctgtaatcctagcactttgggaggccaaggtgggtggatcacctgaggtcaggaattccagaccagcctgaccaacatggtgaaaccccgtctctactaaatacaaaagattagccaggcatggtggtgcatgcctggtagtcccaggtacttgggaggctgaggcaggagaattgcttgaacccgggaggtggaggtggcagtgagccaagattctgtcattgtactgcagcctgggcaacagagcaaaactctgtctcaaaaaaataataaataaataaaaaataaagatattcactgaacctgttatgatgatatatttaagcaagacaccgtgaccctaaaaattagagatcattgaagaccaaagtaacagcatgtggtcattatatttctcaaattgaagtatatgaaatatataaaataaataaatttaattgcatgcttaggtaagaaaatattgataaaaatgattgaatactttatcttataatcatagagggatttagcacaatatgaaaactagattattcatgtaatcaaaataaaatacaatttttattctaattttaactcagaaattattatgcttatttaattcaacaattttactgaaagcttaatgagataaaaaggacagattataattacctaacattgctatggtaacttatatacaaatacctgttagtcaccaaaagtcaaaaagtaaccagcattgcaacttaagatggatcatacaacagaaattagtaccaagttaccttatcttataatattatgtgttattaaaataaaattttaaaacaacaccaaaaattaaattggggctataagcgttgtgcagaaaagatttcatatagcaggaaagagactgccatccttagaaaggcctgcatgcaaggctggcccttggctggtgttaaggaaattggaattgggagggtttccaccattccctgagaagagtggctcactgtgtctaaagtgtttatagaaacagtgtggttactctgaacatctgctttccttgtaagagtctggaatttgggtacatgtaagggagagtaatttccacagaaaaacttggatacttcatctctaatgagactctggtactggtagacatcactgcacatatgctgtcaaaatgtgagcctgggagaattaagcagatcccgggcactccacaggagagaactcctggaggcttgtgcctggtttcctccagaattgaccacaagcacctttttcctctactaattttgcttgtcccctttcttgtaatcaattaaagatctgagtatgactatttgctgagtcctgtgagtccttctagtgaaccaccaaacctggggtggtcttgggaaaccttgacacaaatacattgtgtaagatttgtattaagttgatatgatatatgtaactgtaatcagatggctatttcacagaataatttttcctaaactgtttttcttttcttttttccccttgatatttgactttgagattcttgtatttctatatctatccacaggaataaagccataaaaggaataaatgacacaataatgtcagaaaataatgtggaataagcagcaatcctatttaaaccgaataaaaaatagggaatctgggtgattgacaatatgttccataatatgaatgtttctagaaaaaataatgaaaaggtggtcaattttctgcaactcaactgggcttaattcctttttataataattgtgcaggtcaggtgcagtggctctcacctgtaaatcccagcattttgggaggatgaggcaggaggatcacttgagcccagaagttccagaccagcctgggcaatatagtgagacctcatatattaaacaaaaaatgaaaaacaaaaaaaccttaaaaagaaaattagccaagtgtggtggtgcatgcctggagtcccagctacttgggaggctaaggtgaaaggtgaaaggataatttaaggccaggaagcagaagttgcagtgagccaagatggcaccactgcactccagtgtagagcaacagagggaacagagggaacagagggaaacactgtatcaaaaataaataaataaacaattgtgtatcaggccagatataaccatacaaaactgtagtcccagctactcaggaagatgaggtaggaggactgcttgagcccaggagttcaaggctacagtgagctatgtttgcaccaatgaatagacactttattctagcctaggcaacatagagagaccccatctcctataataattgattaattgtgcatcattcaagtaaattgtataactggagaaaaacatatgactattgaatataccataatagtctactactgatcatagagttcctgtttacttgcttctaatctttttctttgtttcttataaaactaaaaacatgattcacccattaaaggcagttcattacagaacaagtcaaaaagccagaagaatggcatccaaactgtagatgtgttatctaccactccccgcaaacagttggatttggtcattaagaatcagcaggacttttaacttggtgtctgtgtgcacatgcgtgtgcacatatgtatgtgtatatgtgcatgtgtctatgtgtatgtgtataaactatgacagataaaaccattttgcttgtgtaagaatatgtaatataagttgtgcttctcatgaaggaattgcttttctgtctcctgtgctcagtagctatcctcaaaaaataatctcttatttgtatgggtgcatgctggttcagttttacagttcgtattgccatttatttatggtaccagaaagggattgctgagttcctggttctaaagatagttactttcttagtgacacaaatcaatatgtaatacagttcgcccttcaacagcaagggtttcaactgcagcgattcacttatatgctgatgtttttctgcctctgcaacccagagacagcaagatccacctgtcctcttcctcctcagcctaatcaacctgaagatcttgaagacctttgtcaggatctacttatgctttatgagaagtcaatatatcattcctgatgattttctttttaacagcttcatttctctagcttactttattgcaagaacacagtatataataatgcaccacaaacaaaataggtgtctatcaactgcttatgttatcaggaaggctcccagtcaatggtgggctattagtagctaaggtgaaggaatcaaaagttatactcagattttcaactgcacagggatcagagtccctcacccccacattattcatgggtcaactgtaattatttgtttactaaatataaacaatttattataaaaatgaaatagaagatccatttgtatatcaagtccaatttgttataatgtgactatagaggaaacatacaacatactaacttaaaaatcttttttcttatttatgcagaaatattatataggattttagggatcataattaaataaaggaattttttcagacaataatgtttgagattataagttagcttaactaccttcttaaataaatctgaatttcaaaataaagaagttaaattttaaaaattaatttacatatgtatatacatatatgcacatttaatttacatatatttttaaactggtctttttttattaacactaccttaatcttacatcttactttttactttcttatcaagagtaggaccaccaagagaaataagaaattcactatcagaagtcttacctggtttgtcatttttaagtatcatctttttatgttccaaaatttgttgttgaattctatgtatacaaaagtaataaataaaattgctattttaatactgaaataaaaaatatttaccaaacatattaaattctaaaaccatttcaggcaatatcagacctaatatcagaattttaatgtcccatacacttcaaatttttaaaccttacaagcttattaagcttataattaaagaagaaaaaaagtgaagtactcataaatggaggaagcatagctcagtaaatgaactctagttagctggacatcatgtaacatgtcctgcactcagaataagtcctcactctgtaactaatagatattttgttttcagacaagttgcttctcttaggctccctggttttttctaaaaaaggattttgctaccttacttcagtaggttgttaggaagatgtaataagattacatgtttaaatgttcaggaaatagtaaagcaatggaatgatttattcttgaactttattgcttggtgtgtgtttttctataagttctaatattcaattgttgcagttttcagaaaatgttattaagtgctaattttggttattagttgtattctttgtggcttgtaattcagggcattttacctaattcataactaatctgattaaaatagattacctaattgtctcccatcactgagctcatcaatcacaccaaaggcagaaaactaataggtgtcaaaacctgggcttggacaactaccactccttctctacctcctcaaactctgagccagcagatctgtgctaggacgctggatctccatggtcctctccaacaaacagatgagacaaaaccctgcttttattgtttttcagttccatgaaggaaatgcaagttgacattttgtcatttccaagacatgtagtagcaacaagtaacatccccttattactcagctctgttctcatttcagagatcaccttacatcaatagttttatagtgataatcacaatttcaatattgggtgtcttctgttttggtttcactcacactgcttccttggagctactcaacaaatagtcaaatgaccttcccgggactatgcaaaatatggaatgctttctgaatttgtgtgccatccctaggcagcagccatgcttacctgctctgtattgatccaatttttaaatatgtgctgctgaaacaagtacaaagccctgtttgatacatggatactcatgagttatggatgaggcttagctctgttaaatccaactcactgactttagattcagataattttattgaatggcttcctgtgaggtagaattttaaaatatatttaaaactcctggaagagttgtgattagcccaggagattttcattatcatagagacacattacttgaggggccaattgcaagttggttcccactactcggtggaaagataacatggaaccttctgctatctaaccaaagctgctccacaggatgtaaaaaagcctcaaggtacagatctgatagcaaaagagaaagggaaccctaatctcttcctgcaaaattatttgaacatccctgactgttgagagcaatcccaactaatattggttaaagaacagacaaacacgggtctcataggataacttaccatgaatgcctaggctaagtctagctaagatgtgggctccaaataaggtttttagtgtagggtgaggatcaacttgctcgatatttgtgtgggtaaagctaggaggcctagctgccagatcagggtgctgggaacaatgactgagcataagtacataaattaataaaccccctagctttgaactctatgtatgaatcaccacaaaaactgaggggtctgaatgagtgaaggcatcctggtggcaaaggtcaaacattatcagattgcaggactggttacaatggcaaaaatacaggaattgagtccatggaaacaacagaatgatcagaatggcctttttcccccttcttctgacttgtaaaggaagattgccttccttgggcttaggaaaccccttagcttcttggaaaatccaaagaaggaagacacaggagatagccccaggggaaaatacaagattttctgctaaattggacatttcaagacccaataactaattagaaaagtcaggccaggcatggtggctagcactgtgagaggccgaggcaggtggattacttgagctcaggagttcaagaccagccagggcaacagagtgagaccttgtttcaaggaaaaaaaaagaaaagaaaagaaaggaaaagaagtaaaaaatgtggctctttttatcccatgcatggggattatacttagaataaaatgaacaacattgagatccctagggataaaggtcttaaaaatcctgaaaacatcttgcactctacttctaactaatctagacttctgcttgatttctggctaaaaggtagactaactcattgctatttcaaaccatctgaacaaaactaggaactctcacctaatgtataagatggaatagttgcaattattttaaacttcaattcaatattaactggccttttaacataaacacttactttgtcaaacggcaagaaatagcgtaatcttctgcatcttgtccatacatgtcttgagtaaagacattaatattttgcttaagaaggatgttgacaatacccggtgagtcatagtgcacagcaagcatgagggctgttctaaaataacaaagaaatcactccactcaagaactttaataaagacttttttaaacagctagtttgatacactttaccaatttaatatccacctgtcagtgtagacataataacattttgcatgtactagcttgggtctataagcatctagggttctcaggtgttcatctttataaattgtcaccaaggctaaaagaaaaggacaacaaggaaggctcttgtcccactggggtaagacataatacaagttgctaactcatagtcctttgatagccaagaaactgtgctgaggtcacttatctaaagtaggtaaagatttagatgaagatttccccattgctttcctagtctgatatactgtaatttatatcagctaggggtcagataagagctatctgcagactgaaaacgacaacaacaatgatgatgatgacaatactagtagtcataaactaaaagtccacactttaaaaataaataaaactggccaggtgcaggggctcatgcctgtaatcccagcactttgaggagccaaggagagcagatcacaaggtcaagagatcgagaccatcctggccaacatggtgaaatcccatctctactaaaaatacaaaaattagctgggcatggcggtgcatgcctgtagtcccagctacttggaaggctgaggcaggagaatctcttgagcctgagaggtggaggttgcagtgagccaagatcacaccactgtactccagcctggcaacagagccagattgcatctcaaaaaaaacttaataaagctaatacaaaaccctttagctaataaaagattacagtaccaaaaacatccaattataaataacaaacactctgtattataggagaagatgaatcctactatatactgttctttatgttactcagtccaaatatttgctgatctatctgattattcatggtgatatttttcactatatgccagtaattatattaatcttcttattaatatttctgacttgagtgactgttaccactctagaatactcaggttttatttaaaaagaactactgtaccatctcaggctatcaacggcatgtgtacttgctttgtttttcaataaaaattccaccattttctctttcttgcaaattatagcaaataaaagtggggtattattgtcctataaaacagcagaaaaaattaataattcacaaaattacatatttctcaactgaactgaaaatcttctctaaggtgctttgaacttcaacatacaatatagaaaggaagtaaatgaaaagcagtcccttccttctcactcctctgtgctttctgatgtgctgctttttgccttgcaaacaaccctcctctgtctccctggattaactgtggtcattgccaaaactcactttaaacatttaccagtcccaagaatccttgctttgatcacagcacttagcatggtacattgtaatcatttcactgtgtcccactgaaaccaagagcttcttgaggcaagggctgtatcttttgtctctatggccccaaaaccctaagacacagtagcaaacattttaagttttttacataaattaatgatctaaattattctcactaaagcagtgtttcttaaactatattccaaagaatatttgccttaccagaagtattataccccaagagaaagactccatgaccatctgcatttgagaagtattataaaactgtatgttatgtccaataatcaaggaatctcttgaattttacctaatccccatttgacaatactatttgtggcaaacattaacatttgaggaattaagagttttaggggtacagttgccagagcttcccaatgcaggtggaggttttttctgggtggtacagacttgcttgactcacttctatcaatggtgtcaggatcccagatgcgaatgtcaggcactcctgatccaaatgggtcactatggaaatgagctttgaattaagagagattggcttcaaatgcacttattttccttattattaaatagtccatgggtttttttccctaatacaagagaatagatttttatctttactgttcaaaagctcagtatgttctgtgtaagagaaataggtttaaaaaacttaagaacaaatatttaaaaaaccaaagctcagtaagaaatactattctcaattataatggtaatcccgggaccccagggcagctctactttttaaatccatttttattggcttccacttaaagggctacttaaaattattttttattttagacaaaatataaatccaaaataaaaacataatggcttatcaaaaaaattctcatactgatccatatgaattatttctggcataataaaagccagtaagtcacttgcatttctaaggaagagcactgaggagaaagatgtaatgtctgcaatattcagaaattatccaactataaccaggaataacctaaaaaggcttctaggcattcttatgggcagataattatttgtggtatatataaagaaaagtttcaaaaacttctaaattctaaaattcaactccataactgagggatttatatactctatagactatatattataacaaatatgtgctgacttaaaaaccttgaaatctttatcaaaatatactataacataggagttgtaaactcaaatacttacaaggacaaaggaaggttgcctgagtaaaggaagtactaaggtgggcacagtaggaaactggagaatacctgccttttctaaaggggcaacctctgcacagcagaccaaacagtgatagaaactcaggggacaccagatttgattttttaaaataagcctgaagtccagatttctacaccagtcttctaaattttacatgttgattcaacttatagaggaaaacaaacaaatctgtgtaccacattagaatatagcccttgtgtttttatattcgctattaatgtgttactaaatggttgtgtataatccaggtatttgcatgtaaaatattttctttctctagtatcatatgttttaccaaaaaatcaggctctcatatataataaaaattgctcaaaaagactcataatacctgcttcaagaatttttccaacacttattcatttaaaatatatttgtatataattttcccagattgttaaccaaatagataattggttcataggactgctaaaactaaattattaaaagaattcatatctgtatttttattaactccatggacttcagtgtttaaaactgacattttgggtatgctaaagctctataaacttaacaaacgtactgagccagttcataatacaacttcaactaaaaaaaatagtttaggatttgctactattctaattgagaaagcccaacttgtaatgaacatttgttgacacgtaattacatgcatggtgacaaagggacatcaaatcatgaaagggtcagcctctacttattgaaagattacgcataagcaaatttctaaaaactctgaatgtcagtgaatgattaatggtgggaaggaaaagtgttattctgtaagctgagagatattgccagtaatatttcctttcacttcccagtcacaaatgtagagaaagacagataagtcaggctaatttactgaaaaggagaactttgaaggaagtagcacctatcaaatgccaattcttctagagatttcttacgtttttgagatacagaaatttatatgttgcacttatctgttctggggttcttaatcaggagtgtatcctaaacttgagggtttttgtgtgtgtgtgtgtgtgtgtgtgtgtgtgtgtgtgtgctgttattgttgttagaggcaagagtctcactatgttgctcaagctgaacttaaactcaggctcaagctgggactacaggaacatgtcactgtgcccagcttcaagaaaatgtttttaaaaatgttcaggccttattaggtctattacatcaaaatcctcaggggaaagcctacaattgtagatttttaacaaaatgtcctcaggtcgctgtaatgcacaattctgagaattagtgcagcaatcacttcagtctcatctctcacccgcatggctagttccctttatcagttggacatgtggccaaaaagagaaaagagtaagagatagtgtcatttattaaagctccagttaagtttcctgggtatgggtagaacacaaacaagtaaactgaaaatcccacttgattttgctatttacaagctccttatctcccaccttcccaccaagacattctaggtttgagaggagtctttagactcttatctaagtggctgtttctgccaggatgggcaataagtcagttaataatttgttccaccttctgctgaagtgtttctcacttcaccaccacatattcactgccaacctggtttcctcaaagtcttcctaaaattcatctctaggcaagtttcaactcactctcattttcaaaccaaaaattattagacccaaagctaaggagcaccttgtctcaacacataaactggaagaacagcaaactaagagaaaaaaaaaaaactcttcatagcattttccctcattacctaatttccaagtgacctgcatatttctgattgctccccttttcccttcccattttcccctgttaagccctgtgccactgagagatgattcatcagtttttcagaaaattatcagcagcagcaacatgtccacttattgtaagttgctttagttttgtttgagttttaagataaagcctatttccagggcatattttctttcctgtgttgttttatgctaattagggggaataaaaggaaagataaccctgcacagaaaaaaagttgaaaaagttttacctttaacaaattcacaaatattttccaaagtgtgttttataaagctgtaccctttaatgctcctttaaaggtatcaatatttaaaataaaatcttagacaattatttcaaaataatttgcatttgcattcagggaatggttgagcttccaaatataaaaaattgacccttacctatgtcaatgttaaaacaaatattttggaaagaaagttgattgatctataccttgtccagtgcttcaatatttgcaccatggaaaagcagtttttctgccagtgaggtgctctcactatacacagcataatggagagcagtgttgccgtagatacccttaaggtttggaatggtgccatcttccagcagaataacggcacaagactcctcctggcaatggacagcctttccgtattagaccaagaaacagattgtaaattccaagaattcaaaatacacattccacaggtttcaccaactagttatatgtaaatgagatcaatttattttaattctatgtatgcaaatcaaatccatgtcatgctaaaagagttggctctaatatacctgtatcaaaggtgttctattttctttgtcacagatatcaatctggcattttctgttaaccaggagagtgaccactttcacatggccactggcacaggccaaatgtagagcagttctatgagagtaagaggacttttcaggaaactgtagtgcaacatctcaaaacatacaatcattcatgtaactgtaaaaaatgaatagcatgtttttcctctgccttcaaaacaaatacttattttttttttttgaagaaagtacaatacttactagctctgattgctcattgccttaatgaaaacagcagcctatttgaatagaaagagctcagtctttggattcagttcaattagggtttgagtcctactttaaaccctgtcacttaccaactatttcttagcctttctgtgcctcaacttcctcattaatgaagatgacaatagtagctatctcataggacaccatcgtgatgcttaaatgagaagctatgtatttagaatagttcctacaactcaataattgtaagatttttgttttttgagacaagtctcactcttttgcccaggctggagtgcaatgatgtaactatagctcactgcagcctggaactcctgggctcaagcgatcttccatccccagccacctgagtagctgggaccacagatgtgcaccagcatgcccagctatttatttaaaaatttttgaagagtaagaatctcactttgttgcccaggatggtctcaaactcctgacatccagcaatcctctcaccttagcctcccaaagttctgggattacaggtgtgagccactgcacccagccaaatattataattgttactattactactacttaacaaaaacattttaattaggtaaaagacacaattatacctactttgcagaatggcttaaagagtaggtcacattttaatacttctgacattggaatgccacttatattgttataactacaattggtagcatttttaaaattatcttattgatatataaaatagcggggcatcacacaatccatgagaccttacattaagtagaatatggtatactcagcaggtctagggcagttctaggcatataactggcatgtaaatacattttagttcttaaaggtactatggggatagagcactgaaataacaataatgcattttttaaacaaattaattccttgattttcaaacaaactgaagccaaaggaaactcatgattcaaatgaatacatacggctcattttattcaatatttatacttacagaatatatgcaaataagactttccaatgattaatattagtatttaagactgataaacttttgaatgggcagttaaaggttatcttctactattttctaacttcagaaatgcttttgtttgaaaggtgggagataaagtttcaaggagattaagtcccaatattcctatattaaatctctcagcttgtgcaggcagggcaggtaaacatgtagtttttaaggatagaagcgtcctgagagatagtagaatatgtctgctacataacaggtactcaggttatgtttgatgaataaatggaatgaaagaatggataaatacagttggggagatcgatatttttaaataaactcctataaagcaatatttttgcaatagtatttatatattatttttatttttaaagaatacaattaaaatgaaattattaatctatcattgtttgcataaattgaatgaatatataagaaaaacatatgtacataataaaatatataggtaataaaatctggaaacagataaaaacattccctttttacttctgaagaggctaaaagttcaaagaagataacaatacacacaataatgataaaaatagaaagtgagaaattatttttaataatgtaagattcatattcctctcttcctgaggattattcctttattaataaactttactagaagttttgtacatgctcactgcagcaatcacagataagaaaaaggaaaagaactttacttaaaatacaaatgctcagaaattacaaattttatattttgtacatattttttgctaaaacaagaccatagtatgtttgtgtgtatgtataatttaattgatttttttcctcactagctataacaaaatacattttcgcacatcaatatacttctgtatctattgccaccttcaatggtcacatattattccatcttatggatgcaactgaaatttatttataggatccattctatgggttctttttaaaataagtgctgtgaaaaataaagtgcatgtatctttatttactaagggtgttttagtataatggaattgatgggtaaagggcatacatattttttaaatgtagtacttaccaccaaattacctatttgaaaagtaatcagcaacttaaactttaaacaggagtataaaacatcctcacaaatattgtggatagaaaactgtttcattcctcttttaatttaaattcttataccagaaatgcgaaggactttttgctatgtacacaaataacttgcagatctggaaaaaagtactttgcccaattttaaagtttttgatgattagatttgaaagaattccctgtaaaatgaaaatgtacttttcatctaatgtgtatatatacatacaacttttcatctaatgtgtatatataactgatatatatataacagattatatctgtaataatatatatggtatatgtatcagcaatatatatatcatatgatatataataaacaatataggctggggacggtagctcatgcctgtaatccaagcactttgggaagccgaggcaggcagatcacttgagctcaggagttcaagaccagcctggccaacatggtgaaacccctctctactaaaaatagaaaaattagccaggcatgctggcacctgcctgtaaccccagctacttgggaggctgagcgaggagaattgcttgaacccgggaggcagcggttgcagtgagccaagattgtgccattggacaccagcctgggcaaagaagtgagactctgactcaaaaaaaaaaaaaaaaaaaaaagaagaaaaagaatataatgaattccctctaaaatgaaaacacacttttcatctgaatatatatatataatatagttaatatttttcaagtaagctctcttttgttattttttttctgaaacacaggcagttttaatttttagtttgctaaatcaaccttcagaatgcctgcttatgaggtcattcttaggaaggcttttgtcaacataaagtgtacctgtaaaataagcgtttgtgttttcttccggtactttactcattttcatatgtaaaaatttcaatctgtattccatcaggaactcatgtttgtgacataaaatttcattagttttcttcaaacagcagacattttttcgttaataattcatcctttcgtactcattaatccttacgtatatcttacataatttcagtgtttctgggttgcctattctgttctatgcgtttgtcttttcagctgttagtaaacaattaattgtagaaattaatagcacattttgatatctagaggagcaagtgttttttcactccattatgaaattttttaaaatgtcatcacaatagcgaaagacaggaggtgtaatacaaaaatcttaaaaccttgatattttcattcggtctatgtaaaactgattaacacagaaagagctcacattttgaggaaaatgtgccttcccattcaagaacacagaagccacctcccacttccaagtttctctctaagaaccttcagtaaagaacctacctacacagggggatacggatgtaaaacggacagttttatctgagaacttttcgcctactgaaaataactcacggtatttttgacaggggaatgagttctctcattaggcacctcctataatgtatataaaccatgttttaaacgtgtacgttaaaattaacaacactatatgcttaactttgtgagttaaatcactcaaattctccaccaactgctccagccagggaattatgagggatggaaaacagctgagggtccgtttggctccgccgctcagagggtgcccggcgacctccaaggcccccgtcccaggggctgccggaaagccggacctggggaccccctgccaccccgggctgagcccccgctacctgtgctgcttgtccagggcgtccaggtctccgctcctgcgcgccagacagcgctccatctccgcggcgtcgcccttgacagctgccttgtggatcttctgcagttccgagtaccggattcggtacccggaacccgtgtacaggtggtctatggtgcccaggaccgtctggcccctgtggctcctgaagccgaacaacttcatggtggtgacttctcagactcccaaccaactgctcttgagaggaggcagctccctgtcaccttttcacctccccgcccctgcccccgccgacccagccccaaatcccctatccaaccccaaatccgcaatccaacccccaatcggcgatcccaaatctattatctaatccaaaatccgcgatccagcccggtccaccacagccttcagcagcgacactcgcagcctccgacctctcagaccgagtgagcctcgcaaagcctttgggcgcgcgcctgcaccgcggtggccgcccggctcccggaagtcgctcggaggcggcacgcactggcaggtggggctgcagctgcgagagggggcgggcctgggaaccaccgcgggtgtgcgggccttgccattctcaagattcctgcggaaacgctgtgcgctggctgcgctccaggagcaggagcaggaggaggtcgccctctagagtctggagtctggggagaggaggaaggctccttctttgtaggccactggtgttgctgaaacctctgccgccacctgcagggcaccccctgatagcgcccctaacccgccgccagctattggacccgggatggcgcccctaacaccctcccctcgccgctgcagtgtagaaacccaatagcgtcccgaacccgtccccgcctcagacgttgcagcaccagataactcccccaacctgccccctgccgtgggccatgcagccacggattggacccccaaccaactccctcgccgctggcagtgacgccccagaaagcgctgcaacctgatccccgccgtgaatagtgcagccacggatccttaaggcccccaacccgctccccacgatgggcagtgccctcccagatagcggatagcactcccaaccatcccccagccgcggggtatgatgccctggatagcgcacccaacccgcaccccccgccccgtggacagcttagcccccgacagctcccctaacccgtatgccactaccgagaatatggtcccgatagcgcaccaaacctgactcccgccacaggcagtgcagcagctgatagctcccctaactcgctcccactgaccacagtacagccccctaatgatgcacacaacccaccacacctccccacctgccaccggtggggtatcgcccccaaactgccccttgccgctggcagtgtagcccccaatagcgcacccaacgcccccctctatcatgagtagtctggcccgcgatagggcctgaaaccaccccctccaatcacctccctgtacccccctttcccgccccccccccacctgcagtgtaccaccggatactgcccctaacctatcccctgcggggggcattgcagccccagatagcgcccccaacaagtcccccgccgcgggcggtgcagcccccaaaccacccccccaccccactatgggcaatgaagccagaccagtcagcaccccgaccagtccccccaccccggcgccgccggcagtgtaaccacagtagcggccctaacccgccccctgtcgcgggcagtgtagcacccaatagggcccccaaccagccctactgctgctggcagtacagcccaggatagtgcccccaacctgcccccccccccccccgctgctgcaggcagcgcagcccgggatagcacacctaaagtagtgacgcccggaataacacccctaccggcccccggccgcgggcaatgtagccccggatagcgcacctacccaatcgcctttctacgctctggccggctgcagtgtccgctgctgccacccacagcagcgaggcgagccagcgaggccagccgcagtcccacagactctagcctccagcctgtggtaggtgcctcctctttcccttcctgtatccaggcaaggagcagctctcgctgccagccgcctgtctccatcaccgccacacactatgcagaggcaagccctggtgccacaggatccagcctccagccccagcgtgtggcgggggactccgctttcgccttctttaaggtgcgaacggaggggttgggaacgctgaggcacaacagcctgcaatggcgcaactcccccttagcatgctttatatactgaggttatgcaagccaggttcctggacttcatgttctgattggatgagagaaaaccgctaggcctgctagttgggggcactatcccagactgtattgccggcagcagtgaggtgggttaagggtgctatccagggctgcactgctcgggggtgcgggtggggggggtttgggtttaggcactatggggtgctgcaatgcccacggtgcaggaagagggggaagtttgggtgtgttgggtgcgctatggggtgggggggctacactgctggtggcagggggcggggttggttggggaccatatcaggggctgcactgattgctttagctaggatttccaatactatgttaagtaacagtggtgacagtgggcatccttatcatgttccagatcttagaggaaaagctttccattttcccccattccatatgattctagctgtgagtctctctcttgtggtttttattatgttgcagttatgtttcttctgtacttggttttttgaggatttataacatgaaggaatgctgaatttcatcaaatgctttttcagtttcagttgacataatcatactgttttgtcgtttatttggttgatatgatgtatcacattgagtgttgaatgacccttgcatcccagggatacatcctacttgatcctgatgaattatctttttaatgtattgctgaatttgatttgctggtattttgttgaggatgtttgcaccaatattagagatactggcctgtagtttccttctttgatgtctttgtctgattttggtatgagggtaataatggccccacagaataagtttggaagtattccctgctgtttttcaaaatagtttgagtaggattggtactaggtctgtaaatgtgtggtgtgaaaccatcagcagtgaagccattggttcctgggcttttttttactgggagactttttctgatggcttcgatctcattacttgttaccgatctgttctggtcttggatgttttcactgttcaaactaggtaggttgtatgcgtctaggatttctactaggctttctaatttattggcatataatagccagttaagatcctttgaatttctgaagtatcagttgtaatgtctcctattttattttttgattttatttatttgaatcttctctcttttttcttaggcagcctggctaaaagtttgtcagttttgtgtagctttccagaaaaccaactttttgtttaattttgtgtatttttttaatttcaactttatttctgctatgatctttattatttcttttcttattttgggtttagtttgttcttactttactagttctttaagatgtatggtttatttgaagtttttcttctgtttggatggtaggcacttatagctatgaaactctgcctttgtactgtttttggcatatcataagttttggtatattgtgtcttcattaccatttgtttcatgaaatttttcaatttccatcttatatcttcattgacccactagtcattcattcaggagtgtattatttaacttccatgtgactgtatggtttccaaaattcttcttcttattgatacctagttttattcttttgtagtcaaagaagatggccatggagacagcagcgtggtcggagtggtagcaggcagccatcagcaagagctgctccgtgccaggctgctggaggctagagcctgtggcccagtggcttgcctcactgtggttggtggtggtggtgacagagactgcagcatgaccagagtgataggataggggccatcggggctgcacttttcacactgtggggtgggttgggggcactatctagggtgtcactgcctgcactgggggtactggttggtagcattatatggggctgcactgcccatggtggggaccatgttatgggtgctctctgggactgcaattcccatagaggaggacaggttagggcactatcgggtatacgctgctggtggcgttgggggagtggaggtggggggcgctattgagggcaggattagccatggaggggggcaagttgggtactgttgggggctgcactgctggtgacggtcagcagagttggcagtgacagtggtggcatccaaggaaggagcggttctcctctccctggactccacactccagagggcaacctactcttgctcatactggagcgtggcagacacacagtgtttctgtggaaatcctgagcatggcagagcccccatacccaccgtggttcctgggcccatgcactctgagtctgtgccacagagactgcctggcaccccccagtatggagtagcagacaccactgaggacagggccctgtatgtggaggcatccggaacaggaagtggcacctgggtgcagagggttggctgggtctgagtttctgctgctcctgcttcccgaggagtgcagcccaggtgggcccagcagttcctgtggagtgaggagccaggcactgtggtgtctccagcacccaccccaggtcccggtttctggccagcttgggccaaaaggagaggctggactttgaagggtggctgtgagtgccttcactgaaactggcccctgccacccagtggctggcatgacaaagtgaggctctgacgctaccaccccttgcatcttcctctaggattttctggctttgccctcccagctgctccgtgccaggaggaggaggagacacctggagcctgcaacaccacagctcgcttctctgtgggctggtggtggcaatgcagactgcagcatcctggagcagtaggagggcaggcggctgcggccagggtgggggcaggcctacagcagtggccaggttgcagcagtggccaggtggtaggagccttgtagggagggccgatgcattcacaatgggcctggctatgccctgcccgtgctgtggacctggccctgtactgccctgcccagccttgccctggacctgccctaccattacctggactgtctcagccctgctctgctctggtcccaccctggccctgtcttggccctgtgctaccctgtccctgctctggtcctgcccttgcacttgcccttccctggctcaggccctggctccatctctgccctggaccttccctgaatctgtgctgacccagctttggctctggccctgcctcctgtcctgaccctggccctgccatggcactggccctgccaatggtcatggtcctggtcctgtcctggccctgatttgtcccagccctgccttggcctgtccctgccctggccccaccatggccctgcctgttctgccctctcctggcactgaccttgccctgtcatggcccggcggtgccattgccctgccttacactgccctggttgtgccctggccctgcctgacgctggccgctccctggacctgccctgaccttgccgtggcttttgccctgccctcgctatggcctggctctggtcctgtcctggcccagcctcctggccctgatcctggtcctgccatatccctggctctgcccttatccaggtcctgcccttgcctgtgccctggccctggcctggaacctgatcctgccaaggacctgccctgactctgccatggccctggccctgctctgccttgctcctggccctgacccagaccctttcctggttctgtcctggccctggcctttccctggccctgagctggcagtagtctgcccctggtcttggcaccaacctgccctgccgtgctctggctgtgtcatcaccctgccctggccctgccctcaccctactctggctttgaccctgccctggccctaccttggctctcaccctcgtcttggctacggcctgctctggacctggccctagcccagacctggccctgaccctggcctttgtcctgccatatccctggccctggccctggccctggccctgaagtgactagaccctgttttggcctgtccctgctctgcccctaccattgccttgccctgttctgccttgtcctggcactgacccggccatgccattgccctgccttaccctgccttggccgtgccctggctcggttctggccccagccccgccctgaacatgccctgacactgcctcagctttggcaccagcctggctctgccttggcattggccctgctctctctatggaccggctctggtcctgtcctgcactggccataccatgccttgccctgactcagccctgactcagccctggctcagctctggccttggtgttgcccatggtcctgccgtgtttcttgccctgtccctaccctggccctggccctgacccttaccctggtctggccctgctcgtgccctaacgcagaccctggacctgtcctggccctggcccttcctggcttgagaccttaccctggttctgccctggccctgaccctgtcctgaccctgaaatactggccctacactggtcttgcactgctctggtccttgccctgactctggccctgtcactatcctagccccagccctgtcgctggtcttaccatggcccagaccctgccttggccctaccctgaccctgtcctggactctggctgtgccaagaacctgaactgtccttgcccttcttttgctcctgccctgaacctggtcctgcccaggccatggccatggccctgtccctgccctggtcttggcactggcctggccctgccttggccctatgctttcatggacctgtcctgcgtgccctggccctgccttggccctagcctggctttgaccctgccctggccctaccttggccttcaccctagccttgcctgagccctgtcttgtacctggctatagcacagacctggctgtggccctggccctgccgtggccctgtcccagaccctggccctgccaggtacctgtcctggccctggttctgccctggccctccccttgccctggcccctccctggccatgctttttccctggtccttccctggcctgcccttgccctggcccctttctggtcctgccatgtttctggccctgccctgtccatgccccggacctggctctggccctagacttccctggctgtgccctgccataccctggcctggtccttgctctacactgaccctgccctgccttggccctgtgctaccctcaccctgccctggccctccactggccctggccctgacctggccctgtcttaagccctggccctgccatgtccctgccctggccctggttctgccctgcttctggccctggccttggtcctgtcatgtccctggctgtgaccctgcccggttctaccctggctctggccctgccctggttctggtcctgccctggcccagccctgactgggcactgtactaccctggccctgcccagcccaacactgcccaggctggagccctgccttggccatgcccatggccctgcccctggtcctgtcgtggcccttaccctgccactggtcctacgatagccctgaccctgacttggccctggtcctgacctagctgtggccctgccctgcttctggccctgtcctggccctgccattgccttggccctggccctgccctggctcctacctgccctggcctttcctcggccctgtgctaccctggccctgccatgttgtggccctgcctctgccttggccctgctctgggcatggccttagcattcgacctggccctgccctgcccctgccctggacctgccctaccattacctggcctgtcccggccccgccctgccctggccccaccctggccctatcttggccctgtgccaccctgtccctgccctgcccttgcattggcccttccctggcacaggccctggattaacaaagttgtacagtcatcaatcaccactgtttcagtgcagaacattttcgtcttcccaaaaagaaacccctcagtaatcactccctgtccccctcccctcatggcccttggcaaccactattctagttttttgtctctatggatttacttattctaaactagacatttgatataaatggaatcattcagcatgtgacctttttgtctggcatgtgccaagatttttgaagcgtactttttaatttttctctgatattttctaaagtttagatttttaaatctttctggatttaattttttttttttttgagatggagtttcactcttgttgcccaggttggagttcaatggcacaatcttggctgactgcaaccactgcctcccgggttcaagcaattctcctgcctcaacctcccaagtagctgggattacaggcatgtgccaccctgcctggctaattttgtatttatagtagagatgggatttctccatgttggtcaagctgggtctcaaactcccaccctcaggtaatccacctgcctcagcctctgaaagtgctgggattacaagtgtgagccaccgcgcctggctaaaaaaatgtatttttagaagtgtattacaaaaaaaaattaactggatgtagtggcaggcgcctatgatcccagctactcaggaggctgaggcagggagaattgcttgaacctggggggtagaggttgcagtgagctgagatcatgccagtgcactccagcctgggcgacagagcgagagtccatctcaaaaaacaaaaaataaaataataaaataaaatagtattctcacccttttctactcacattccctctgagctaattagtgctattggctggtgtgtatccttccactcacatttacttactcgtacattcaaatgcaaaatacacatacatacatagtatggtggtggttgtattttaaaatgaaattattttatgcacattactttgcatcttgctttatttaagaaaatattttagctgttcctcaaaatagttgatagagatctaacacattcctttcaatattaggtaacattctgttacactaatgagcctcatttactcgaccatttcactgaatgggtggatattcagatgttttcagttttttgacaccatagctaagtcttaataaatatcttgttcatatattcttcttaactgatgctcttaattctataggctagaatcccaaatctggggtttctgtgtcaagaacatttgcatttaaaatttgtaatagttattactagatttatgttccccagtagttgcagcaggtcacagcttcatccccactgaaatgcctattttcctgcatttttatcaggattagctgttttgcaatctttaaaattttttgccccactaataaggtaagaaagtatcttatctcaagtattcttaccttctctttcagaggtaaactgtatgacgtaatggatatgttaattaccttgattgtggtactcattttagaatgtataagtttatcagaacatcatgttttgtacaccttaaatatatacaatttttatttttcaatcatacctcaataaacctgaaaaaaagtcattcagaaaggaatcaaacagtagatactagcattaaaaatatgttataaattttcaagcctagaatgataacataagattaggaacaagaatatgtgtgtatagattttaacatttatatctgtgaatattaatcgatatatacagatcttgaaggcaagttacaatcgtgaagaaaatgaaaattatgttgtgtacctataatatgaaaataaaaaatcacacaaaggcatataccttcactcaaggatgcatactcgagtatacatattatttataataacctaaatttgtaaacagccccaaatgtccattaacttgtgaataaataaaccaacagtgataccttgaaagaatggaatactattcagcaataaaaaggaactaactactgactcggcaatattcgtgaatctcaaaaatattatgctaagtgaaagagagatgacatactatgtgatttcttttaaaatttctagaaaagacaaaattcaggacagaaagcagatcagtggatgccaggagtaggagttaagggaggaaatttattgcaaaggaacagtaggcgactgattgtggtgatgtttgaaatgttctatgtcacgatcatggttgtggttacatgactattctgaaagttcgttaagttgtacacttcaaattgctgatgctcattatatgttaattataccttaaagctaataattcatatttaatctccttgtggttttgatttgcatttctctgatggccagtgatgatgagcattttttcatgtgtcttttgcctgcataaatgtttctgttcatatcctttgcccactttttgatggcgttgtttgattttttcttgtaaataatttgtttaagttctttgtaaattctggatattagccttttgtcagatgggtagattgtaaaaattctctcccaccctgtaggttgcctgttcactctgatggtagtttcttttgctgtgcagaagctctttagtttaattagatcccatttgtcaattttggcttttgttgccattgcttttgatgttttagtcatgaagtccttgcccatgcctatgtcctgaacagtattgcctaggttttcttctagggtttttatggttttaggcctaacatttaagtctttaatccatcttgaattaatttttatataaggtgtaaggaagggatccagtatcagctttctacatatggctaggtaggtttcccagcaccatttattaaatagggaatcctttcctcatttcttgtttttgtcaggtttgtcaaagatcagatggttgtagatgtgtggtattatttcctaggactctattctgttccattagtctgtatctctgttttggtaccagtaccatgctgttttggttactgcagagttgtagtatagtttgaagtcaggtagtgtgatgcctccagctttgttcttttggcttaggatagtcttggcaatgcgggctcttttgtggttctatatgatctttaaagtagttttttccaattctgcgaagaaactcattggtagcttgatggggatagcattgaatctataaattaccttgggcagtatggccattttcacaatattgattcttcctatccatgagcatggaatgttcttccatttgtttgtatcctcttttatttccttgagcagtgatttgtagttctccttgaagcggtccttcacatcccttgtaagttggattcctaggtattttattttctttgaagcaattgtgaatgggagttcactcaagatttggctctctgtttgtctgttattggtgtataggaatgcttgtgatttttgcacattgatgttgtatcctgagattttgctgaagttgcttatcagcttaaggagattttggactgagatgatgggattttctaaatatacaatcatgtcatctgcaaacagggacaatttgacttcctctttccctagttgaataccatttatttctttctcttgcctgattgccctggccagaacttccaacactatgttgaataggagtggtgagagagggcatccctgtcttgtgccagttttcaaagggaatgcttccagtttttgcccattcagtatgatattagttgtgggtttgtcataaatagctcttattattttgagatacatcccatcaatacttagtttattgagagtttttagcatgaaacgttgttgaattttgtcgaaggccttttctgcatctattgagataatcatgtggtttttatcatttgttctgtttatatgctggattacatttattgatttgtgtatgttgaaccagccttgcatcccagggacgaagccaacttgatcgtggtggataagctttttgatatgctgctggatttggtttgccaggattttattgaggatttttgcattgatgttcatcagggatattggtctaaaattctctttttgttgtgtctgtgccaggctttggtatcaggatgatgttggcctcataaaatgaattagagaggattccctctttttctattgattggaatagtttcagaaggaatggtaccagctcctctttgtacctctggtagaattcggctgtgaatccatctggtcctgcactctttttggttggtaggctattaattattgcctcaatttcagaacctattatggtctattcagggattcaacttcttcctggttttatcttggcagggtgttatgtgtccaggaatttatccatttcttcgagattttctagtttatttgcatggaggtgtttatactattctctgatggtagtttgtatttctgtgggatcagtggtgatatcccctttatcattttttattgcatctatttgattcttctctcttctttattagtcttgctagcggtctatcaattttgttgatcttttccaaaaccatctcctggattcattgattttttgaagggttttttgtgtctctgtctccttcagttctgctctgatcttagttatttcttgccttctgctagcttttgaatgtgtttgctcttgcttctctagttcttttaattgtgttgttagggtgtcagttttagatctttcctgctttctgttgtgggcatttagtgctataaatttccctctacacactgctttaaatgtgtcccacagattctggtatgttgtgtctttgttctcattggtttcaaagaacatctttatttctgtgttcatttccttatgtacccagtagtcattcaggagcaggttgttcagtttccatgtagttgagtggttttgagtgagtttcttaatcctgagttctagtttgattgcactgtggtctgagagatagtttgttataatttctgttcttttacatttgctgaggagtgctttacttccaactatgtggtcaattttggaataggtgtggtgtggtgctgaaaaaaatgtatattctgttgatttggggtggagagttctgtagatgtctattaggtccacttggtgcagagctgagttcaattcctggatatccttgttaactttctgtctcgtggatctgtctaatgttgacagtggggtgttaaagtctcccattattattatgtgggagtctgagtctctttgtaggtctctaaggacttgctttatgaatctgggtgctcctgtattgggtgcatatatatttaggatagttagctcttcttgttgaattgatccctttaccattatgtaatggccttctttgtctcttctgacctttgttggtttaaagtctgttttatcagagactaggattgcaacccctgcatttttttgttttccatttgcttggtagatctttctccatccctttattttgagcccatgtgtgtctctgcacatgagatgggtctcctgaatacagtgcactgatgggtcttgactctttatccaatttgccagtctgtgtcttttaattggagcatttagcccatttacatttaaggttaatattgttatgtgtgaatttgatcctgtcattatgatgttagctgcttattttgcttgttagttgatgcagtttcttcctagcctcgatggtctttacaatttgggatgtttttgcagtggctggtaccggtggttgttcctttctatatttagtgcttccttcaggaactcttgtagggcaggtctggtggtgacaaaatctcagcatttgtttgtctgtaaagtattttatttctccttcacttatgaagcttagtttggctggatatgaaattctgggttgcaaattcttttctttaagaatgttgaatattggcccccactctcttctggcttgtagagtttctgccgagagatctgctgttagtctgatgggcttccctttgtgggtaacccgacctttctctctagctgcccttaacatttttttccttcatttcagctttggtgaatctgacaattacaagtcttggagttgctcttcttgaggagcatctttgtggcattctctgtatttcctcaatttgaatgttaacttgcctcgctaagttggggaagttctcctgcatagtatcctgcagagtgttttccaacttggttccattctccccgtcactttcaggtacaccaatcagacatagatttggtcttttcacatagtcccatgtttcttggaggctttgttcatttctttttactcttttttctctaagcttctcttctcacttcatttcattcatttggtcttcaatcactgataccctttcttccacttgatcaaatcagctactgaagcttgtgcatgtgtcacatagttcttgtgccatggttttcagctccatcaggtcatttaaggacttctctacactggttattcagttagaaattcatctaatcttttatcgaggtttttagcttctttgcgatgggttcgaacatcttccttgagctcggagaagtttgttattactgatcgtctgaagccttcttctctcaactcatcaaagtcattctccatccagctttgttctgttgctggtgaggagctgtgctcctttgcaggagaagaggcactctgattttcagaattttcagcttttctgctctggtttctcctcatctttgtggttttatctgcctttggtctttgatcatggtgatgtacagatggggttttggtgtggatgtcctttctgtttgtcagttttccttctaacagtcaggaccctcagctgcaggtctgttggagtttgctggaggtccactccagaccctgtttacctgggtatcagaagcagaggctgcagaacagcgaatattgctgaacagcaaatgttgctgcctgatcgttcctctggaagtttcatctcagaggggtacccggccatgtgaggtgtcagtctgcccctactcaggggtgcctcccagttaggctactcagggttcagggacccacttgaggagacagtctgtccattctcagatctcaaactctgtgctgggagaaccactactctcttcaaagctgacagacagggacatttaagtctgcagaggtttcttctgccttttgttcagctaggtcctgcccccagaggtggagtctacagaggcaggcagccctccttgagctgcggtgggctccacccagctcgagcttctcggccgctttgtttacctactcaaacctcagcaaaggtgggcacccctcctccagccttgctgccaccttgcagttcgatctcagactgctgtgctagcaatgagtaaggctccatgggcatgggaccctccaagccaggcatgggatataattgtgccatttgctaagaccattggaaaagcgcagtattagggtgggagtgacccaattttccaggtgccttctgtcacagctttgcttggctatgaaagggaattccctgaccccttgcacttctggggtgaggtgatgccttgccctgcttcggctcatgctcggtgcgctgcacccactgtcctgcacccactgtccgacaagccccagtgacatgaacccaatacctcagttggaaatgcagaaatcacccatcttctgcgttgctcatgctgggagctgtagactggagctgttcctattcggccatcttccactttaccacttatcattagttttaaagaaaaaaaaactgacataatggaaattttcactatacctcaggaagggaattcagtggaaaagtaagcttcctattccctcttgaccttcagtttatacttttcttcctaagtcaagtactactactggtttcttatgctatttctagaactagcctatctatctgttgtctatttaaaataactcattattcaccttttatttgagctgccttatggatctatgtagtttttctgtctctttttaaaattttttatgtggtaaaatacacataacataaaatttaccatcttaaccattttttagtgtacagtttagtaacaccatctttcacattgttgtgcaaccaatctccaaaaccttttcatcgtgcaaaacaaattctgtatctattcaacagctctccattcttccctacccacaactcctgcaaccatccttctactttctgtctgtctgaatttgaatacctcacataagtggaatcatacagtatttgcctttttgacatgggcttattttacttagcataatgtcctccagttccattcacgttgccttgaaagacaggatttcattatttctttatggctgaaatagtattcatccgtgttgtagcatgtcagattctcttcctctttaaggctgaatgatattccattgtatgtatataccaacattctatttatctaaatgtatctgccaatggatttttcagtttccaccttttggctattacaaataatgctactgtgaacatgggagtacaaataacttcaaagccctgcttttaattgttctgaatatatatccagaagtggactttctggatcatatctttattctatttttaattttttgaagaatttctttttttaagtcacttttgatggtttgttctttgccagaaaatatatttttcaattttatcagtgcagagttgtatataatatttatatattttacttgtacaattatataaaagttgtattatatttctatattctcatataattatcttcagtatccatgtttgtaactgtttccttatttctctttttcctctttcatgtttactattttattggtctttaaaacctagactttgatttttttttgttgttgttgtttttgagacagagtcttgctctatcacccaggctggagtggagtggcgtgatctcagctcactgcaacctccgtctcccaggttcaagtaattctcctgcctcagcatcctgagtagctgggattacaggtgccggacaccatgcccagctaagttttgtatttttaatagagatggggtttcactacgttggtcaggctgttctcaaactcctgaccttgtgatccacccacctcagcctcccaaagtgctgggattacaggcatgagccaccgcgcctggccgtttcctagcatttaaatttttctgtttcattaattttagctttcattttatttatattgttatttcttcaggcaatggcttggttcatctattttcagttttttttaaaaaaaactgtaaagtgtaaggctctaaattttatttttttagttacaggaatttttaatatattctggttattaatcccttatgagatacattatttgcaagtattttctcccactctgtggattgttgtttcatcttcttgatagtgtccttgatagacacaagttttaattttgatgaagtccaatttatctgttttttcttttgttgtctgtgctcttttggcatcatataccagaaatctttgccaaatccaatgttggaaacatttctttcctatgttttctcctaggagttttatagctttactgttaagttttggtctttgatctattttgatttagtttttgtatatgatgtaagggaagggtccatcttcattcttttgcatctggataatcagttttcctagcatcgtttgttgaaaagactgttctttctccattgaatggtcttactacttttttcaaaaattgtttggtcatatgtgtgaggtttctttctaggctctctattccattggtctatatgactgtgcttatgctagtaccgcattgttttgattactgtagctttgtagtaagttttcaaataagaaagtgtgagttctccaactttattctttctcgagatacttctgactattatgtggttctttgagattcatatgaattttacaatgggtttttctctttctttttgcaaaaaagaccattgggattttgataggggttgcattgaatctgtatattgctttgggtaatattgttactttaacaatctaggaacatgggatatctttccatttatttatgtttaatttctttcagcaatgtttgtagttttttattgtataagtttttcacctcattgattaattcctaaatattttctttctgatgctatcataagtggaattgttttcttaatttcctttttgtatttttcattgtgaatgtatagaaatccacctgatttttgtgtgctgactttgtattctatgactttgaatttattagctctatcagtttgtttttggtgtgtatgtgtcatctttagggatttctacatatatatcttctgtgaatagacataattttgcttctttctgtccaacttggatgacttttccatctttttcttgtctaattgccctgtctagaatttctagtattatgccgaatagaagtagaaaaagtgggtatcctcatcctgttcctgatattagggggagaactttcagtctttcactattgagtatgttgttagctattggtttttaatatatggcttttattatgttgaggaaatttccttctattcctagcttgaggttttttttttttaatcatgaaatgtgtggaaatttgtcaagtggtttttctgtatcgactcagatgataatgtggagtttcttcttcattctattgatgtggtgtattacattgattttttgttgttgttgaagcatcttgtgttcctggagtaagtttcacttggtcatggtgtgtcatccttttaataggctgctgattttgttgagtttttcatcactattcctaaggtatattggcctgtagttttcttgtattatttttgtctggctttggtatcagagtaatgttggactcatagaactaagggggagaagtgttcccttctctttaattttttggaagtgtttgagaaactttcttctttaaattttgggtagaatcaacccatgaaagctatctggtcctgacctttcctttgggagctttttgattactgatttgatccctttactagttatagttctatttagattttctatttccttatgagttagttttggtagattgtgtgtttgtagggatttgtccattttgtccagattattcaaattgttggcatacagttttacatggtatcatctcatcatcctttttagttttgtaaataagtagtgtcaccactttttttttttttatggagtcttgttctttcatccaggctggagtgcagtgacacgatcttggcttactgcaccctccacctcctgggttcaagcaatactcctgcctcagcctccctagtagctgggactacaggcgtgcaccaccatgcctgtgtaatttttgtcttcttggtagagacaggagctttaccacattggtcaggctggtcttaaactcctgacctcaagaaattcacctgcctcggcttcccaaagtgctgggattacaggcatgagccactgcacctggctgtgtcaccactttcctatatttagtaatttggtgttctttctctctgtctctctttatttattttttggttaatcgaactaactagagttttctcaactttttcagagaatcagcttctggttttgtaatttgtctccatgtttttctgttctctgtttgttctcactctaatctttagtattttcttccttctgctagctttggtgtagtttactctttttctggttccttgaggtgtatggttaggttattgagttgagaattttcttgtttttttaatgtaaaggtttacagctttaattttttcttttagccctgcattcactgcatcctgtaagttttagtgtattgtgttttcattttcatttgtctcaagatggtttctaatttccttcatgattttttcctttgatctattggttatgattcacaaattttcccatatttgtgaatttgttagtttttcatctgctgttggtttttcatttccattatgatcagaaaacatactttgtaagatctcaatttctttaaatgtattaagacttactttgtagcctaatatatggtctgttttggagaatgttccatgtacacttaagaatatattgtgctgatgttgggtgagtttaggtgttgacatgttacatttgagcatacatgtaggtggagatgtgagatattcatttaggagaaaagccaagggaagaaatttgttaatgaactgtaaagaggggttgacattcacaagaatatgtaatttttaaaaaaaaaacaaatttagagcgatagaacagccttgaatatattcttatttagaaggctgaagtttgaatatagcctggagtgttagaaaaggatggaacagtttatcatagaccagagccaagagagtataatatttagattttaaatatcaaaaagaagatatgatcagctgaattcaaagttgaagcctaggcatggtggctcatgcctgtaatcccagcactttgggaggctgaggcagaaggatcacttgagcccggggttcaagaccaggctggctaacgtggcggaaccctgtctctactaaaaatacaaaaattagccaggcctggtggcaggcgcctgtgatcccagctactctggaggctgaggcgggagaatcgcttaaccccaggaggcagaggttgcaaagagctgagatggtgcctctgcactccagcctggtgacagaggaagactccatctcagaaaaaaaaaaaaaaaaaagttcaaaaaacagctcccttgtttgggaagaactgtttttgatatacccttaaaaattcaataaagaaaatagaaaaaagatgttttttttaatttgagaagcatttaaatgatgaccactacttaaattatgaaattgaaaaccagaaatataaattatgcactctttatagtatgagttttagaggttgttaatttgctatcatattaggtaaatctggaatagaagaaacttcatatattatcttattgctatatttgaattctgtagaagttgtttctggacagtctatggaaagctcttgctggccacggaggaagtaggcagctgacacaaagttctgcaattgcctgtgccaaactgtgtaaagcaagtacttacatcaactgggaagataacgctgtcattttcctacttgttcagtccatggtggttgatcttacggtaacatgcttattctttctctactacaaagtttaagaaaattaaattaattttctaacataagtattatgtcaaagagaattgctaacattaaagttctgattcttctttgataagttcataggacttgcttttgttgttactgcgttcatcagtctaaatggactgagaatatgaagaaaacactgttttcttaaatgagcataaatatacagacttgggtttaaaataatgtggcaatcagggcctgaaaggaacctatatatggtacaggaagaattgtatcagatggatgaaccacagtattggtgctttgtgctgcttctggcaactgaattttactgccatctatgtggataatgtgttgatgttattacatattagtaaagaaatactgcatgggtatttaaaggcttttgttttctgttggggtttttatagaacctgctttttaatccaagtaagccattctcaaggggcagtcagcctgcagatgtggatcttatgattgactgccttgtttcttgccttcgtgtaagccctcacaacaaccaagtttaaggtgagggcactggtttttatctaactatgtttactgatgccgttatcctttataaacggaaagactagagggataacaggttcacctctatcggcatttctcactattacgtattgatgttcatttcaagaccttaaaaacttagtgttttttaaaaaactttctgtttgctgttctttttgacttcatttgtattactgagtatttttctcatagaaataatctgcttttttttctttttctatagatctgcctggtgcagaattcacattctacatttcactatgtgctggtaaattcactccatcaaatcatcaccaatgtaagtccaataggcattgctaaactactaaaaaaaaaaatttcattattttctttgcatatttctttttacgaaacgcgctcttggttttcaaaaaggttctgaatttagatgtacggaataggaaaatttctccacggtgattatatttgataattgataaatacttgtatttttcatagtaagccttgaccgaagggcccatattaaggaagatggagttaataagatgctttggaaagataaatctaaagcattttattcagatcaaaagccctagagaaaaatggcactgaaaatataatataaaattttcatcccaaagcttttcaaacatattatttgaatactcttagccctttcacagcatttgatacattgacttgccaccttaccatttaagttaaaagtaatagtatttatgttgtagtccagtatagcacactgacaaaatgatgggactatatttgatggtactttaaaaccttttgatcttaaatttattcatattgtaaaatttcatttttcttaaaataaaatattaacatactttaaaagaggtattcacaagatacaaaagcatatcaaacaaaataagtgaaatcattaaaaggtacttgggaaaccttcaactctgatatggtgacattaaatagagagcaaaactttatcagatttggactgtggatttttaaaattctaattatgaacaacccagttttgaaagttctcagatgttggccaggcgcagtggctgatgcctgtaatcccagcactttgggaggccaaggtgggtagatcatgaggtcaggagttcaagcctggccaagatggtgaaaccccatttctactaaaaatacaaaaaattagccaggtgcggtggcaggcgcctgtaatcccagctactcgggaggctgaggcaggagaattacttgaacctgggaggcggaggttgcagtgagctgatatcacgccattgtactccagcctgggagacaagagtgtgacttcatctcaaaaaaaaaaaaaatggtttagcacttattacttagtcattgcttccatatttgtgtacattgctattggtcccataaattgatacatttcttgcagtctttttggaacgctatttggcaggagctatacaaacatttcattttttttgtacaaataattcaatttctatgactttaaaaatgttatgaatataactcaaaaggaaaaagctgcacacataggtacttatcgctcttgattacaataggagaatattagaagaactttactaggaggagaatgggttaatattcaataatgagaatggtattttaacttggtgagctgataaacattcattaaaacctatatagggccgggcgcagtggttctcgcctgtaatcccagcactttgagaggctgaggtgggtggatcataagatcagaagttcaacatcagcctggccaagatggtgaaacctgtctctactaaaaatacaaaaaaaaaaaattagctgggtgtggtggtggacccctgtaatcccagctacttgggaggctgaggcagagaattgcttaaacctgggaggcggaggatgcagtgacccgagatcacatcaatgcactccagcctgggccacagaacgaagccacgtctcaaagaaaaaaaaaccaaaaaaaaacctatatagatctgcggggcatggtggctcatgcctgtaatcccagcactttgggaggccgaggcgggctaatcacgaggtcaggagatcaagactatcctggctaacatggtgaaaccccgtctctactaaaaatacaaaaaagtagctgggcgcggtggcgggctcctgtagtcccagctactcgggaggctgaggcaggagaatggcatgaacccgggaggcggaagttgcagtgagccgagatcgcgccactgcactctatcctgggtgacagagcgagagtctgtctcaaaaaacaatagcaacaacaacaacaacaaaaacctatatagatcacatagcaatatggaaaaacatgatacgtcaagtgagtatactgtgtttacggcttcgttaaaacgtggaaaatacaaaaaaaaaagggaatatgaaaagaaaatcaaagcagggaaaaggctaacacgttttctttcaatatatatttttaaagttttatcaaacaaaaatatagagaatttgtcacttgaaaaagctactgccagtaaattgtaccaagttttggtacaatagtagcaaatttgatttttaatttgtgttgtttttttttttgatatgagagctttaaattaatagttttttgagattctcacaattaattgcaattttcattaaatatctcaaagtaattacaataacaatgtttgaaatgagataatatgggtctggcctttatacgttgataagttgaccaagggctgaaaggaatgtccagagcttcacagtgtctgctgggttgggggtggagcggggtgggaggaatgtgagttgggattgtagaattggagttaagataggatcagtttgaaggaagagtttacgttttattctttatatctttgatggttttaatttatgtaataatctatatgttatatattgtaagtgaattatttaattcctgttaatgttctctgaaccaaattccaatttcagttctatggtccactgaaatactttagaatggataatctgttatgaaatacaaaatccattttgcttcctctctcttgattttgaaaaatagttgctcttttctgttacgagagactttgtggcaagtgagacgatttttacttatcttttgctgtgtgtattaattttggcaagcccttcttacttggggattaactttttgtctcacagagttctttaatatctgttgaaattattttgtttgtttcttaaaggaatttttacagttgtatattgttctgaattcatcatttagctttatatggttatgccagttagagtaagaatgatgagaataaaatgatatcattctgtctatattattccctagaggtttgtgttcaccagagtttatctctttttaccttttactatgtatggaaactacaaatgaaatagctcaatttcttagcatttatacagtaagtactccagcgttatgtttaccaaacatgtttgagtgagtcttctctttgcctttctctttttaaaaaaattcaggctctgctggttcttcgtcagttagatagcattgatttgtggaatcctgatgctcctggagaaacattttgggagattaggtatatgtacttttattctttaaattcaacttttaaattttattttgtattttttgtcttgaaatattaactctatagtatttagtatattgtaaaacttatacttccaaaggttttatgattttgtatttttttgacttcaaattattagaatttcttgttttaactgtaaaaaaaagtgtcacagcaatttagaaaataagttttaagaatagtgctaaattttgtcacccaaacaagtactgttgtttggtatattccctttttcagatttcaatgtggttactactatgatttaaatagattttcacagttttaagcctagaatgataaaattttgtaaaaatattgttttttcagttttttaagctgtgtgatctttcacaaactttctgtaataccaatgcttttgatgaatgaattaatcatggacacctgcttagaagacaaaaatatatacagaattttgtggtctacttcctagattatataagtcattacattttcatgagcataaagtcaccacactgaggaaaatggaaatgtgtaaacctcaagtttgccattatcttataggaataggtgtgctaagttacatggcagctgaattaaaccttactctagagcaatgctctccaatagtaatataatgagaaccccatatgttaaagtttcctacattaaagagtaaaaagaagcaggtaaagttaattgtattaaattttatttaacccagtgtatattatctgtaatataattgcaacatgtaatcaatataaaagttattaatgacatatttcattgtcttttttaaataaagtcttcgaattttggtgtgtcttttatacttgcagcacatctcaatttgaacaagccacacttaaagtcctcgatagccatgtgtggctgcccagtggctaccatgttagacactgcagctctagagtagggatcaggaaacttttctcttaaggccagatagtaaatattttaggctttgcaggtcatacagtttctgtcataaccattcagttctgcctctgaagcatgaaagtggccacagacaatatgtgaatgaacgggcgtggctgtgtttaactaagactttatatttacaatagcaagtgataggctggatttggcctatggatggtagcttgcagacccgctgtcctcattccgctacctctgtccgccaggggagtgcctaggtggccagaacctcctctgggcttcagcccatgctgcttaggtccggggtcccttggggagtctctgaacgtgcacctcacagtctcacgtttgtgtggtggacgatgtgcacatgcctgcccatcctgggtggaatcctcacgtgcttgagagtctaacacacttctaataactcatgaggaagacaaaattataaaggaacttttcaaatacttagaactgaagaataataaaaatactacatagcaaaatgtgtagaatgtagttaaagttcattgtatacagggaaatgtagccttttaaagacagactggaaaagaagaaaggctacaaattaatgagttaagcttccaacttaaggacaaaagaggcaaggcatggtggctcacgcctgtaatcccagcactttgggaggctgaggtggacaaatcacctgaggtcggaagttcaagactagcgtgaccaacatggcaagaccccgtctctactaaaaatacaaaaattacctgggcatggtggcgggcgcctgtaatcccagctactcaggaggctgaggcaggagaatcgcttgaacctgggaggcagaggttgcagtgcaccaagtcagaccctgactcacgctaccgcccctgccacccccagttgtttcagaagtgctgcctggggcagaggatcctggaggcctgggaagccaatgaccacacacagtaagagccactcggacatggagggacccagcctggccagtcagggatgcagaaacgcacctcagccgggcactggtgatgctgcgtgcaggactgcatgctctggtggagcgctgggtgtgcgacacagctccacactctgaggctgccatgcaaggggccctcctactgggtggacagctgcaaatgctacttggggaggggacacagggagctgacaggaagcagtcccagccccaccaggcacctgctctggcccctgcccagcctggcttgcctaggctttgccctcttgcgggtcccctgtccattcctgatcttcccccaagaactcgggtgctctatcagcactcgcacatggggacgcgttattttggtctttccgtgtcttctgcttaatgggtgctccctctggtcaggacacatgtcctgcttattgtcctggacccaaagccatccccacccattcattgtcctgctgggagctgtctggctctgggcgatatgaggagggactcactggagctgggaggggtttgaatgcagctgtggggaagcagaggctcagctgggctgcacagcatggaggtcccgcccgaccctccctgcagggtgctgagcctgagctttgcagctgacagcgtgggctcagctcctgcgctactgctgccaccagcagggctcaggccacaccacggcctttctgcctccgtttccctgtctgtaaaatgggatgagagcagtgtctgtctccacgtctgtctcagtggcacttttggtagtgaggttggggtgagcctgcttcacgtggcaggtgctgctcaaacagaagtgtcttggaggcagggccgggggcacaggctccgggcaagggccgggctcttgctctggaggtgaacctggaggcctgtgccacttggctcaccgggtcatgggtctggcaaggttggggccaggcggccaccctgatggtgcctgtggcttttagggcgacgggtggcatgaggcatgggaacataggccacctcacgcagatcgccaacgtgctggtgcagaacctggagcagggctctgtgcagacgcacatcagcgaggtcatctgaggtgagccccccacccggtcatccttttgctggtcgtgggcaccggggctctgaaggagctgctgcccgaggctcccctctgcccgtcagcaggtgctgattgcactgacagtgaaagaccccgcagccgtctctgtcctctcacttcccacattagatctgtcctcagggggacctgggtctcatgtgtcagttctgttgggcagacttctgtggagaccctaccaggcatcagcatgtagcacaagagatagtccctgctgggggcagttggtgactccggagctggtgctccgaagccattagcgctgccaagctccttgcagctcatggagtcctgcctgggtgtaggcagtcctggccgtgtgccagctttgctctgcattcaggtggttggagagtctcacattctcactcaggtgtgagacttcatagcacaagtctcagggaaacaggtagcaccctgtttcttaagagcacagtgggttaggtggacacaggcacaccacatgtgtggcagaggcgggcccagccatggcccctcctccctataccggtacaaagtgaggaagctctggatggtcctccccgcaccccaggaccatagggtgaggggtctcctgggttgggccccattggcccctagcaaggtcaggcctgccggccgctgtcacaaataataagagcagggcaagaggaggggcaaaagagatgggtggaggtggaggccagggagggctccccagggcaggggtggtttagggaggcgaggggcaagcaggaagctcttggatcatcccatacagtctcccgattgtgaatccttccagggttctgacctccctggaaaaacagacaggacacacacccaggcctgcaggctgctgctgagtttgggcctgtgaggcagggtgaaggaagcttgctgctttctcagattctgttccacagcttctgcgtttctgggagttcctcagaatgggcttccacaccaacagacttggaactcggttgcccactgaggtcttggtaggggcagaagtgcccaccaccctgcccacagttgctgcacctcaatctcactgtggccccaggcccctccggacacgcgactatgctgactccttcccatccagcaaagctcctgcttcaggccctcagatggactgaccacagtagcaccgtcccatcctcctggacccaggatgcacctgccagagcgcctgagtgccctgagccatgtgcaaggggtctcccagggctcaccaggctgcactttccttgtagagctccctgtggattgccatggctgctaggagagcttcgtggaggagacgctgacggagaccaactgcaggaacactgtggacttgttgaggaggcttggggctgcgccctcggcgccggcatggtgctgggacgcaggaggctcggggctgcccccttggtgcatgcacggtgctgggacactgtcagacactcctgtctttgccccgaagcagaggccaagagaggcacaagggccgcacacctgcctgctcctcttggacgcgggtgcccgagcataccctgcaagtgtgcagtctgtcctccaggctgatgcctgcaacacagaccctgtcctgtgccacacccagggctggtctctgaggacctctgtgcagagctggtgttggccccaggtcccttccctcccagtccaggagctgtagcttgttggcagggggctccatatgcctgagaccaacctgccccctgcacatggatgttgggctgtcacggggccttggcctcacctgggcacctccttacacagcaaggcctcctgggcccagagatctgatgagtgacatgttgggcggggtctgggagccctgggctgggcagggtctggggcgctgggctggctcacacacccaccccatctggcctgtgttttaggcaagcactcactaccttcactcctggagtgaggacattgagggtgctttccctaatgagctgtcccttcagcaggtgagggcgtggccggcccctgcaccctgccgggcccttcctggcacctgtgtgctctgtgcttggtcctccagacaagtctctgatggcatctcactagcaaaagggagagggggctcatctcggagcacgtatggggtggggtgggtctgaggggagaactccaaagtcactccaccttgatgagagcactgagaacacagcagataaactcgaaagtcaaagaatatgggacgtatctcggatgtaagcacagtgagcacgcggcctgagtttgggtagaatcgtgagccctgaacagtcagagtttactgcccacttttgctggaggagaagctcctgaacaactagagagactgtggttcccaaagagcagcctgtaggcctgaggactgctctatgaccggcgtcagtccctgcctccctccctccgtccctccttccctccttccttcccaggccttctctgactaccagatccagcagatgacggccaactttgtggatcagtttggcttcaatgatgaggagtttgcagaccatgacaacaacatcaagtgagtccacttggatgccccctgcacgaggcacgactccccctcctcgctgctgaagtcccatgggggcagctcccttagtccttgccgggagataacaggtgtttccagttgcatgagggtgctgaggcccccagtgagaaccaggggaggagcactgaggcctcagatgagcaccgggggaggagccctgaggccccagatgagcaccaggggaggagcactgaggccccagatgagcaccgggggaggagcgttgaagccccagatgagcaccagaggaggagagctgaggccccagatgagccccgggggaggagctctgaggccccagacgagcaccgggggaggagcgccgaggccccagatgagcaccgggggaggagcgccgaggccccagatgagcagtgggggaggagccccgaggcccccagatgagcagtgggcggggcagggagcgccgaggccatcccccttgctcttgcagcgccccatttgacaggatcgcggagatcaacttcaacatcgacactgacgaggacagtgtgagcgagcggggctgtgcggggtcatgcaggcaccctgttcccaggcagctcaggccgcgcccatggctcggtctgtggtgggcctgtgcggtggggctgggagaggcccctctgtggagctaggaacagtcgcttttcttgaccctccccatcatgccctccagcccatggcgcccacatcctgaactaagcccctctgggagccctgtggggagagcgcctcctgtctcccccagaccctctggaaactgaccttggcgttttactctgcagcccagcgcggctctgaggcctgctgcagcgaccgcatccagcactttgatgagaacgaggacatctcggaggacagcgacacttgctgtgctgcccaggtgaaggccagagccaggtgcggggcctgcccatccccccaaagcctctgccgaggaggtgcagcccccagaacacccgtcagatgcccagacgccctgctgtttgttatgccggctcgcagagcaagcacaccggtcctgcaagcactggcgcccaacgcagcgggtgaccctcaggagctcggagctgaggcctggagcgactcgtgctcctcactcagggcattctgtgctcaccctcagcctggagcctgctgctgtcactgaccctcagtgttaggcatctgtcctgggccaccaggcatctgactctgcatctccccgaggtttggagccccccatgcttcagaaagctgctcaaagaatggcccggagtgcggaggccaggatgggaaggcgagcttggaagcagaccatgatgcgcctggggcaggtgccccctagaccctggaaagaacaaagcccctcctctggagggtgactcagaaggtggtgctgtggggcaggggccggggatgtgtgtgttgggggcaggacatggtaccctggcctaggggtgtggaggcttcatttggagctgaggcatttggggctcactgtggcccgaaacctgcatctccagctctttcccagccatcctgagtaggggtctgtgctgccctgtgcccggcacaaggtggtctcctgcccctgcctctcagttgttgtcactctgccactgtcaccaaggttggtgggtggtgtccacctagtccccatcgtccacccggcccccacacaatgcgacacaggcctgatgcccaccccagcacagcagcacagcctggcctccaccctcacggctgacatctagggcaggagccagtccaccccgcaggctgcgcggctgataagacccctctccttacccctgctctgggggcagcactgacccactcaggactttggggagggggcagggatctctgttaggaggtgccgagctcttagctgaggccaaaagagagagcaagggcaacaccctggggaagcaggaacgtcccagataggaggaaggcggctcatccttgaggccagggagggcctggtggtgcttggtgagctgccatctctgttggatgcggtcctggataggacagggcagtggcatcacctccacactgtcagcgtcagccatgctggaggcctaggggccctcaggcgcctgactgagccccaggtcatggagggcagtggcattgcctccacactatcagcgtcagtcctgctggaggcctaggggccctcaggtgcctgactgagccctggatcatggagggtagtggcatcgcctccacactgtcagtgtcagccttgctggaggccggggggccctcaggcgcctgactgagccccggatcatggagggcagtggcatcacctccacactgtcagtgtcagccctgctggaggcctgggggccctcaggcgcctggctgagccccagttcacacaccccatggatgttggcagcttgtcaggaccctcgagctgtcccctgttattctctgaggggctgaggggcactgcttgggcctccctcctggagcagccccatgttcctgtcaacctctgtggggctcccagtggggggtgcgctgcctcccctttgcctgcagcaccccagacaggcctgccctcacctggccactgtgtctctcacccagcagacaccatatggatgacagtgtttgataagccagcaaactcgacgcccatagccccaggagtggtgagggacagggttccagcgtgtgggcagctggcacctcagctccagaggagaaaggctgggccagttcaccgaattccagcctttctgctggtaacaaatgcattggcaggagggggccgtgtcaggaagtgccttccagggtcaggaggtgcccgtcctccgggactgaccctgtcctcgtccttgtctgtagctccgagtcagggcccaggtgcagctctctgatggacacaaaacacagccaggctgaggcagccagagccaaggcctcgagaaagcctgtgagtagcagcagtgcaggcggcacccagcctcctgcagaggcctagccttgcccagtttaaggcctgaggccagctggcccccctccttggggtcagtgggaggaggtggccaggaccctgcatgctgctaggtctcttgtgacattggggtttgatacagcagtgggactggagcagccacgtgcagatggggaggcccccagaggggaggcagcaaggccattgggctggccctgagccccgtctgagcaggtggcacagcccaggtctgtacccttgattctagacagcagcaccaggaccccagcattgagatgtgtgtgggtgggttgttggcaggaagccattctggggcctgatcagagcccctggcccccaggcccctagtcaggccgagaggctcccccagacaaggctgagagctccaggcgagcgacagctggcttccaacactggtgtccccggtgcttgaaggagctgtggcaggaccacacaaggcagagcgggccccttcctgagcctctgcgtcctcatgtgagaccagggcacattgccctgtatcatgggggaggcaacagtgttgcttgtgtggagaccacatggaaggtgtgtgagcctgttagcctcgtcatgcggtttccacacaggtacacgtgtgcaggcgacaggctgcatgtgagagggctacacgtaagggatccctatggccggggttgccacaccctgtggcccctcctgcctcactggacagcacaggcctcctactctgcagtcagcccagcttctccatgtacctccgtgtacctccgtgtgtgtcaccaggaaggcccccctgctggcctctgacagcagctcctgtgggggctccgacagcgatacatgacgaccagaaggcagtgagtgccatggatgctgtgaacacccgtccgggctaggaggccccccgcccccgctgcccacagtggccaggacagaggaggctgtcagcaggtgtgtggggcgtcgggggtaggtgggcaggcctgcctgggtgcaaaggctgcggcttccaggctctgtccccagctcttagctcccttgggagcaggctgaggccaggccagggttcttctccacactgcttccccgatggccccgtgaccccttacaggctggctcggggtggtcatgcccacgcatttaaatagaggcaggatgggaggagtgtgagggcttccttcttggacagaacatctgtgttctctgttgtgagtggttaagacaagaagacagggcctggatgtcccagacagtcccccagggacttggtgggggcagcccctaccccagaccccagttagagagaacagcccagctcttggggctctgggcctggctgagccgcctgggatctgggtaccctggaggtcggggaggggcacagactttaagtccagcaggtaagcaggcatctgtggagctcatgcagacctcgcctgctgctccccttccatgggaggcctagatttccagatgcctcagaagccaggacagtaggatgggggggcgggggcctcaggactgcacttggggcatccaaaccctgactgagagttggaggcagcttgcagatggtcagaggctcaggctcccttgagcctccaagagccattcctggggagagagtggagagggaggcactccctgtgaggaggctggagtctggccagcccctccagcaagctgaatcccatccatccccccacaggaagaaggtccctggcatccttcagtgaacagatacctcttctggcctttggggtcaggggttgggagtttagcaggagggcaggacagctagggtagatgctagggccaggtaaacctgagggggaaggtaggactgggcttgaagtggggaggagggcacacccggcaagggcaaagctgtgcagaggacctggggcctgagctccctgtaggtccaggcaacagtggggaagtccttgggctggattcctctaggagaggacaaggtgcctttcacacctggcggtgcatcccagtcactcctgtttccatgcttgtgaagggcctgcctggagtggggtgagggtgcccccagcctcactgcccaatgcagctcagcctgcaagcgtcccacctgtcctaccctgccccgacaggcggggcaggtctgacacctcagaggaccctgcccactgacccccagcagtcctggagggtctgtgtggtattggggctccgggcatctcccccagccaggctgcaagctcagcaccaggctggctctccctgccctgttgaccagcaggccatgtctgtgctcacagctcctccccttgtttggccacgctgccgtcagggcatctgcagcaagtggggggcacaacacgggaaatggggccaaggccacagcggtggatgtcccgatgctgccagtcactggaaagcccaggccagagcccctcgggttgaaagtcatacagagttcctgcgtgggcttcattccttcttaaagtttagtcactgaaattcttaaaaatctttatccagccaggcatggtggctcatgcctgtaatcccagcactttgggaggccgaggcaggtggatcacgaggtcagaagttcgagaccagcctggccaatatggtaaaacccgtctctactaaaaatacaaaaattagccaagcgtggtggcacacgcctgtagtccccgctactcgggaggctgaggcaggagaatcacttgaacctgggaggtggaggtcgcagtgagccaagatcatgctactgcactctggcctgggcatcagagtgagactccatttcaaaaaaaaaaaaaaaaatctttaccctcagctgggtgtggtggctcacacctgtaatcccagcacttttgggaggccgaggtgggcggattgcccaagctcaggagtttgagaccaccctgggcaacatagcaaaaccccacatctactaaaatacaaaaaattaggcgggcatggtgacgcatgcctgtagtcccagctactcgggaggctgaggcaggagaattacttgaacctgggagccagaggttgcagtgagcagagatcgcaccactgcactccagcctgggcaatagagcgagactctgtctgcaaaaaccaaaccaaaacaaacctttacccacttttcctaaacaacccctaaaaaactttgctctgaaaagcagggaatatcactgtgcaaagtaagttgcttttctccacggggctatctgtgtaaaacttgccactgagagctctctctgctctgctgtgacagcccagcctgcaggtgagcttgcttgcactcccacctgatcagagcacgcctccccgggtcagacactcaatatccttgccctgcaggaggccagagggcccatctgctgctcatggccaggctgggccttggggtgcctgacccccccagagcaagccccttagatgcccggcagaatcctctctcccctcctgtaccttggaaggtttccccacactatgcccagtgtcaggctgaagttgggatcatggcacaggagcctctggggccctcggagaatgaggtgcttgatgatgggcagaatctgaacgcagcctggacggaggtttgaggtcatcaatggacagacagcttgtcccagcacttagaactcagggcagcagagctgcctagctgggcacaacctgggccaccccacagagggcaggagtgggagaggccaaagggggtgatcccaggacatttttgtatctttagtagagacggggtttcaccatgttggccaggctggtctggaactcctgacctcaggtgatccacccacctcggcctcccaaagtgccggcattacaggtgagagtcaccgcacccagcctatttttttttttttttttttttttttaatttaagacagtctcactctgccattcaggcttgagtgcagtgacgcagtttcggctcactgcaatctccacctcctgggttcatgggattctcctgcctcagcctcctgagcagctgggattacaggtgtgtactaccacacccagttaatttttttttttttgtatttttagtagagacagtgtttcagcatgttggccagactggtctcaaactcctgacctcaggtgatctgcccaccttggcctccaaaagtgctgggattacaagtgtaagccaccatgcccagcccacagtgcagtttaaaccaccatttctgtgaagctttctctgcctgttaccaggtactacccatacacacactacccacgaacaaagaaatgtgcgttgttctgtgctgcacgccaccattgtaacaattgtgatgatttactttacaagtttctctcccctctagactgttggctcttacatttttatatctttatcctttcatgagtatttagcatggtgtcgccttgtagtgaatgcttcataaatatttgttgaatgaatgaattttaactgattatctttttctaagccacatggtaagatgttcttgtctgtctttcagttaggactttatttttacttttaagttcagagcttcttgatggttgttctttctaaataattattatttagcaactgactgtcataagagattcaaaatacatcaaatatctaacacaaaatataaaatatgcagtaatcttagccctcaaggaaacccagatttcccaattctgagtatattgttcaagttccttttccaggacagctcaaggttctgtcatttatttttgtctttgtttttgttttgagacagtttcactctgccatcaaggctgcagtgcagtggtgtgatcatgactcactgtagcctcaactttctgtgcttaagtgatcctcctgcctctgcctccagagtagctgaaactataggcacacgtcatcatgctccacctaattatttttttttttttttgagacagggtctcactatattgctcaggccggtctccaaatcctgagttcaagcagtctttccacttgacctcccaaagtgttaggattgcaggtatgaaccactgcacctggccaatttttttatttattaataaagtgtttctaaaattgtcactgccggtcgtttggaagaatctgagaagtagcagctctgctcttgtttccagaactgcatcctatgctgaataggtctgggtgcccccagcgcaagcctcaccttattcacttactgactcagttatctcctgactagagaagaggcagacccatctccatcctaggaggagctcttagttcctccagacagggatgtctccctaggaccaggcagtgtggctgggatgagccattcatcatcagggaagacacaggctacctgggtagtcatggtgtagaatgcctccagcacagtgcacagaagcccctgaatctgggaagaaagctacttccacatcaggtgagaatgcacctctgcccatacctggactgggtcttgataacgccctcagaaatagcatgcagggagtcaccagtcttttgaagtggtggtggttgttctcttggtaaccaagatctgggctgcttgctgtgcccagtggcaccccttgagggtctcttatggtgggcatcactggtcttcttaatttgctactgtgtccatcctcagagtcctttgctttctttttcaaagtcaagctgtgctcatatcctagactctttcctgtggagaaagcacgtgagttaaagattcaccacaatagttcacacagaagcttattccagaaccttcccatgcacattcaggtgacccccacttgtctcacctcccacttgccagctccctcagcctgcctaataaagtgagattgagttcgctcctgggtccccaaatgctctctgaatgccaggatctctaaaattctttcaaccaccaagaagaccccttcttacccaagccttgcttgtcttgcttgtctgttaggataaaaaagcaagactctacctgctctatcttgtcaggtgtccttgaaatttttttttttttcttcatttcttctgctcatctgagctggactctgattctgttgataaaaatgggtgtgtgtgagtgcctccaactgaacaccttggaagccttagtccatttttgatacactagagatgaggtttccacaaaaactcagctctcctctgtgctccagcgcccaggatctgtaaagtgctgcattcaaaaacgctctcagtttctttctcaggggagactgtgttaatctatatcctgtcccttctcaccttggaagagtcaagtcttatttgatctagcattgctgtttctggttttgagcttagttttcttggaattctatttcccatttggattggggtctggtcctagtggaaaagggagttcgggtgattcacctttctctagacccagagtcccatagtctatttctgactcatatttgtgggtcattttctcaactgatgctgttcagccagcgtcaaaagtgagtgggaagaatacagtcccaggagatcatcaccacatttctcaaagccacctgagggctgtaatccatttcctgtcctcaattacaaaataaactcctatcaaagacatacagcttagtatccttcattccacccctctttgcaaccttcataagaacagcccaaggtcttacctgagctttgagtgcagctctcactggaatggaaagagatcatcttgcctttttcttcaaatcatttctcctcctcatctgagcccctttctgcaaaggagatatgttggaaagggggctggccagtgaggtcttggatggaggcacagtgagaattttggtctgcagttccccattccatgttgaagctcaaatgaaaggtcctctctcttacacgtccagattcagagtgtagcatgttatgctggacttgtcttttttaagtctctctttgcttcgttttctgtttttgttttgttttgcttttttgagacagggtctcactctgtcgcccaggctagagtgcagtggcgtgatcttggctcaatgtaagattctcctgcctcagcctcctgagtagctggcattacaggcgcatgccactaggcctggctaatttttgtatttttagtagagacggggtttcaccatgttggtcaggctggtctcaatctcctgaccttgtgatccacccgcctcagcctcccaaagtgctgggattacaggagtgagccaccgtgtccggccataagcctctgtttataagcatggctcactcttactggctgaagagattgatttctcttgcctgccgctcttcatagcctccataaggaatgtttcaggatgtgattatgctggggacttagacacacataagggaagacttttgcagagtcctgccatagcatcaaaaaacaagatataacaaaaccaggaggcacagggactagaatgcaggaggctcatcaccttttgtttcccagtccagttcccacccaggagtactcaaaactctgcccagattcaaaatgcaaaattaaacagaccatatattaacagttgtatatatattttgcacatgaagaaaatcattatagtattacaattgtgtgtgtatatatatatatgtcataatttttcaaatgcttggaaatgacaaatattaaattatacttgattgtattaaatatatatatatatgataaaataaaattctatgataggggatgtggcatcttgaaggcctagttgggctgcgtgtgccattaagatatacagggctgcagaaaagtaaaccccaaatagaatattcctttatcccttgaatgttggaaggataattagatcagatatgatcacgttaaattgatcagattggagccagtgctaactcaatcaacttccaattcctaaggcagcagaaagcccagctggagagggaaagttctgctctatctcaccctccctcattcatcctgggagccacactgtgttctgtagaatttgctcaggattcacaatctgagctgataaacttacctggattatcacaacccttaccattttggtattttctttttgtttctcagtttaaaatgggttgtgaatattactaacgcatcataagttttcagacacccagtatgtcacttgtttgggtcccgtcctaggaaatcaatacctaaattcaaaaagtcatcctaagattaatctttgaaagctgcctgtgatgatttggactcactgacctcccttctcttcaacctacagagaaagtgaaagagctaccaagtcttagggcacatggacagaaccagaagatgcccagtgaagtgctaggatagggtacagtcccatagcttttgggccaaatgagaaggaaaagcagaacctgggaccaggaaagccccagcagctccagactccagggctctttaccaagactgatgggaggaactaaggcaaagatgagacacctgtcaccaagacacttgtcttggctgcttccacctctgactcagttgtgttggtgtgaatgcaaaactggctctctggctcccaagaatgtataaatccaggagagaaaaccaagcatttgggcaccaggcaagaggtctttccagattccccagacttttcagaattccccaaagatactgaaactcagacccattctgaccccaccccaaaaagtatcataaatggaatctgggagccattcagagtctccagcctcctctttggtgaaaatggacttggacctaaaaaggcaccccactgtccacaaggacacaaattcagatgctgagcactggcctcctgccttccgatgacggatcttacctgagtcccatcaaagcccatactgttccccaacctccaccatccagacattaggaacaatccctcagaactgtcttgatgagatgggacaagcagtggtagaggtccgggttcagaatggttgcctcatctttcccttctgagaagtctacacctgctggtctgagccttcatcccttacatggcttagcccatgtcccaggaagtgccccctaaaagaaccttctagtatttttctcccctgaagagagggtccatgagacactctatgccaggaaatacatggcctccattctcacatgacttgattgactgataaactgataccctgagaaagaaaaagatgcagggaacatcttgtgtgtggtgaatctgcgctcctcagctgtggtgcctgtgcaaatggtggaacccaaaagaatattgggtggtagacacacagaccctacctaataaaattatgtaagtttaagtttaatatagatggaacttataatgtcatataaaatgttgttacttattttgtaagaaagctgatttagattttgtaaaggcattaaatataattttaatgggaagctatgaaaattgtgtgcatttggtgtgtaaatgactcattttgggtaattctgtaaaggccacctatgaatgtgagtcattagtaaccaaatctcctatagatagcatattgcatatgcattttaatgtattcttttacctgagctcaatttttcttaattttattcatcaaattttatacactttagataaaagacaccttgtagttaccatgtgctctatggatctctattttgttagaaatacagattttcaggcaaaacccaagtatattgtatcaaaatcaggttttaaataatattcccaggtgattcacatgcatattaataattgttaagtgggggtaattctataattaaaagggaaaaggttatatgagtgtatttatttgttaaaaaggtacagaaaagattgtatgtttcaatgtatatacatcttatctcatagaaaataactaaaaacaataataaagtggggatggggaatgagttgtagtagaagttaaacagaaacggcacataattagtagatgtttaggctgagcatcagtctattatactacattgcttattgtatatatgtttaaaatattctctaataaaatacttgtataaaaagacaaactttatctacaacattagcccttaagattgtggttacttttggaggggaggaaaagagaaagtggtttgtgtggcagaaacaaggctagttctatcctatgcctacacaaatgtatttgcttgtaataatttactgagcattatgttaatgctttggacatatatttctgtatgcacgtcattcaataaaatttaaatattacatatttaatcttaacagaataatagcaatgtttggtattgttttgtttgaaagtgaggcatttagtgtcagacatcatgagatgggtattaatattccaaggtatttattcacatcctgactcttgggggtccccctcgatctttcatttttacctcaattgagtaagtagcatggttgtagttttggggaatgcaattttttacagcaaagtccttcctccacgatagtactcaccacggccaggacacttagcacagggccctgtacgtagtgtgcactcagtgtgtgtggaactggtttgaatcagaaacaaaacaagtagcagaggtcagttctgcaaaggatagaaagtaagtaatcaagactgaaaggccgcaactcagcagcaaacacttctatgttaatttgagaaataatttcaactggctctccaaaagatgttggtttaaagcagtaacatgggagttgagctgtgtgctataatcacccgaaagctttaagtcacactgttgcctaggtctcactccagagattctgacttaattaccccattgcaacttgggtttgaagactttaaacactcctctacaaggttattgaaatatgcagccaagggtgagaagcattgattcagggtgaggaatacattggctgtatgtgattttcatgtgtgctttagggatttgccccatagctgctcctgaatgtggggtcttagaaaacatctttacccttcaaagcatattctgctgattggctaaattgcagcaggaaaaaatatcagcagctctgtctttatgtcacttgccttcaaagcaaaaggtttttcaggcacagtaatttgatttagtctgtgttaaaaatcataaatagcctagaaatacaaaaaaaaaaaagagacagagtttgcagatatgtggagtgcattataggtgttttcaaatttctcctatgatgagaaattaaaaatagaatgttgggcattaatttcctaaactcagtgctcagccatttcctcaaattgtttccagtttttccaagagacttcagaagcattccctggaatgaattatttccaatggtgaagagtactagatggacaggatgagaatctcaaagaaatcttgcttctatttcagaagtgccactgtgcagcaccttgaaggaccaggaaacctggttgaggagtgtggtctacggaggtgcataggcttcagagtcaggcagagttgatcctgagtcccagcccagctgagttagaagctgtgggacagttatataaacctcatctgcaaaaaaaggccatactaaaattgattgaaaacaacagcaaatttttaaaatttcttcttgtgttcatgccttgacaatggattttatagtggttcccattaagagacagaatttgttttccacatcttgaatctttatggccttatttgcacaggccaaagctgtgcatatgacagtgtgctagtttggggcctaggctcaaaaagtctcaaatgcttccgttttctttttcagaacccttccatctccatgagaacaagcccattttggcctgctgggcaaaagccaaaatgtccccattgacagctcacttacagaagcagagccacttaattcaccagccgttcaccactcaacgtctgaaggagccattctgagccctgaagaatagcccagctgagcccagcctaaatttctaaccagctcaatcatgagcgtttgggattgtttattatgcttactaatatatacaaccattaaagacaggatgccaggatgccaggacagattgattacaaataacctgcaaatgcttggcaccctgtaagtactgattttatttgccctttatttagagttagatttgttgttagatggtattgagttatatggaagtgcaggtagatgtggatgcatatgactggtgcttaaacgcacgcagtgccccacaccacaggagaaaaacacacagttacagacagacaattaggtccaaagccaaatagcaaaataaggagtttgacttttatctattccctccacatctgaactctggaggtcaaggctgtaaagagatctgaagacatggtgttctcccctcctggggccccatcattttttgtttactgtttgatatttgaaaggaagagaaactcccatcaaacagcaactgggagacagtggtctctacgtgacactctctgcttgcagcccctgatctctctaggggcactgaccctcccacccttgagcctgaggagaaaagttagtagagagaggccagtagttggtagggagagagcccacttccagcagaaaagaggtgttcaggccttcacctccctgagatcggagcatcagagccctcatggctgctggtttgaagtaaaatgtgctgcaaacataaaatacacagcgagtttaaaagatttagatccaaaatatttataattatttgttgaccacacatgaaaaataatattttgggtataatggcttaaacagtattacaaacaatttcacttgtttctttttattattactattatttttgagatggagtcttgctctgtcacccaggctgcagtgcagtggcacaaactcagctcactgcaacctccacctcctgggttcaagcgattctcctgcctcagcctcccaagcagctgggattacaggtgcccaccaccatgcccggctaatttttgtatttttagtagacagggattcattatgttggccagagtggtctcgaacttctgacctctgtcctctcagagtgctgggattacaggcgtgagccaccatgtccggagtctttttattactatttttgatctggctaataaaacatttaaaattcacaatagctaacgttttattttttagaggattgcttctctcttaaaatcttaggtgtcccactccaaagaccggcggccagaaaggttatgaaatctgaaatattaaataattgtcattatattgcttccatttgtgaacaacgtgtgtgtgtgttttataaacgaacataaccttcataacgttatacaccacaatgctaaaaaatgacccctggttagagccaggcgcagcacagacagaaagccctgcctgaaagtgactggagccaagagcctgacactctcggctcattccgtacagtgtatggtagcatcttctgacacgcaaggcctgagggcgcggtgcctgcactactatccaatcagggcgctggggtgggaactgtccaatcaggcgcgcagccagggaggaaggggcggcttccggaatctggcgcggcctttgtctcacttcagccagagagcggggttagggcttcattgccttgtgtcctctgctccgggagacttcggtgattctgccactccctccgtcgctctgtgacctgctggcattgaatgatttatagctaagactccaggacacccctgaagccgagaaatggtgagtgtggggggcagggcgtcccgagactggggaggggactccttggaaccggctggacatggcggtgacgggacctagtctgcgagtcgagtcctctgcagctcagccctcagtcccctccggtgcagggactccgggcgtcctgtcctgtccctgcacggcggctttggccccagcctgtagccctctttgcgcagctctgcgcccgcagccctgcatcttccccaggttgtgaggtgatgaggcgaaagtcatcggaaagacgccgactcggtgtgcagggttcctgcgtggaaggagctgtggtccgtggggtcccccgtccctaccttaccctgttcagaattagactgaggcaccattaaaacatagacagcttatatgagtaaacagtgattaattaatgggacagcgctcagcaatggtttgtggtttgggggctactagaaggtcttgaaagaaaggcttgtataaggtgtgtgaggaagcaaagacaattaaataattgggtacagttatgtagtcgctttatttggagtgtctgggtggaaatttcctggttatgtaatcagggattaattggaggtttgtagttgtttaagcttgaatttcgtttcctcctaaggtagtaacttagaaaaaatgcatttgagttaggtttctttttttacatagaggcctagaccactagagccacttcaatctaattgactgctatgtaattattttaactttaatcaaagacactggttttcgcctgcattttccaaatgtgtggcaagcagggtctcacatccactactctgttctgccagcctaacctggcttgaagtaaaatcttaaatttccggtttcttgctgacattccccaaaggcaacttctcccctcccatacattatcaactatttttgtcctttattgcacatttcagaaacagtattttaattaatcactttttcacagagcagtggatggcaatttgtaaaatacttgttttctacttacaaatatttcacatgagaaaaaagcagaaaataatcccctggcactcagctgtaaaaaatctttctgctgtttctccttgtatcctcccttagcacaaacgcccttattaggacatcttgggattgaggttttccttgggaaactttatggggcaatgtttccttagccacattcgggcctttttctagtcctgagttttagaactgtcttgagatggcccaagatacaaaccagagccatgtcttttgggagttctggtgaatatcagccctttggtaatcttccagaggacacaatgagggatgggagtacagcttctcaaaggagcagctgaatgccctgggggtgagagaaatatccaggcttacccttcctgtaaaaaaagaatcccttgggatttttaagatttttttttttttttttcccccaaccccagtttgcattccatggaaacacattgcttgtcagccaatcagatgctggtattcagagaaaaagatagactattcctgtcttctgaattgtcttatatttgcgaagggagagaaactaacctgaaggacaagaaaaacccaccccagggaggcagtgcaagaacctgcaaagcaaaaagcggagtggggcacagtgcagtgtctcctgggagggtgggcattgagcacttcagtgaggagtatgggggtgagagaaagtcccaagggataaggtggcctgatttgacacttgagtcagatgtccctgttccagaaagcactgccactccctgagtttgtccccctgtatagatttgctcacttatttcaacttcggtttttttaattaactgtaaattggatctcaaaggataggcagaaaagggcttttaaaaaaagttggaaagagcaaatcagattagaaggaaggtgagagagggtgggcagaatgaagggtggcaaaatcagattctaaatcagagagcgttcaaccctgaagtcagctttttcttaggaggttaataaagagagattgaatgttgaatcaggctgagaataggtcaaagttcagggatctgaacaaataggctttttttttttttttttttttaccatcgaagatgaaattgttcagccaattgtatatgagaaaaagatggaaatgtgtggtccgtgtctgactctgtggtaggtttagaaaaaaagaagagagagtattattgaagtcacaatgggaagggtgtctcttttcgttaagctgatttcggagaacaaaaagcatgaggaattttttgtcacagctatttagcagaattacctacctgccccagctttcaccaccactttttcttgccctatgcatctctgccatgtggctgttcctgagctgtatcttcaataataaactggtatatgtaagtacagtgctttgctgagttctgtgaatagttctatcaaattattgagcttgaggaggggaatgtggaagcccttgatttgtaggaagtagttgagaaataaagataggtatccagaggcatgtgactggcatcggcagtggggacagtgttatgggacttagcctgaacttgtgggatctatgctgactccgggcggtgttggaattgaggtgttggacagctagttggtgttggataattggttggtgttcagcaaactccttacgttttgtgtcagaagaaagacatcactggggcctggtctacaaggagactccaggtgtctgagggaagtgaggctttgttctgcacacaggcttgtcgtcaccctgtgcgttgtcctgtaattccaggtctcctcctactgtgagatggaacgagagcttagagtgaaggagctctgagaacctattccctcccctgaccctgctgccagcccctacatgcttctaacccactcctgaacataaccactaaaaattgatctggctacattcctcccacgacaaagttttaccctcaggaattgtgctcacaacagctttcctcctagagatttctgccgagaacatacacaggtgcctagaagactcctggcttatctaaactgtagacaatgaatctctatcgggaacctgtttttttcaccaacccaggtttcttggactacctgatcataatctcttctgattgtgtgaacacaggaataagtcagaacatagcgctgcctgagcctgtatctgtagcacaaaccagttccttaaccaattctgccctgcatccccacccatagttcttgatagcatctttctcttttctgcttttttcttccccacaaatcctctttcacgtgtacacagtgtgcccaaggccatccctccagtgcctgaatccagtgcctactagaagtcagatgttaatgagttcaagaccatgcctttagacccggctattgtaggagcaaatacaaattagaaagaaaaggtttaatgctttctctttaaaatgagggaagaatttttgctcttctttcttttcttaaagcatttagtttgaaaacctttctctacttctttgaaatatatgtaaatcatttttatcagttaaataggtcatttggttgtgtgtgtgtgtgtgtgtgtgtgtgtgtgtgtgtgtgtgtatgtgtttgactcagaattgtcttaatctaggacctgggaactattgctttgaaatgtaattagcaagtttatacaccctatcccacagtttctgtaggagagtagaaggctgccttcagcaggtgtctaactccacattgcaacactacctcctgtcatgaagatgagggaagtttatttttcctttaaacattaccaattagaaaacccagatgacagcccaaattataataagctgtgtatgacaaatggtacagttgagtactaattatgttgacctttctctgtttgcaatctcttagtatattgcctgtgatgcacatcacattttagtttaattatataacaaaacagttttcttgctgttctgttatggtggagagttgttgtttgtttttttgttttttttttttttgagagagagactctcgctctgtcgcccaggctggagtgcagtggtgtgatctcggctcactgcaagctctgcctcccacgttcatgccattctcctggctcagcctcccgagtagctgggactacaggcgcccaccaccacgcccggctaattgtttttttgtatttttagtagagacggggtttcaccgtgttctccaggatggtctcgatctcctgacctcgtgatccgcccgtctcggcctcccaaagtgctgggattacaggcgtgagccaccgcgcctggctggtggagagttttttagggtcagaaatgagtttgctttcagttatgttttccacactgtccagcattactacatgttatacacaaggtgcccaacaggcttcactttagagagaactttctttctcaggattccagtcccaacccacaattgtgcagcaaagtgccccccaaatcttcaaacagaatggtctctctttggaatctacagtcccttctagagcagggagagtagatttttacaaaaataacttttcaggatagcagtcaagtattccacctccgttagtgctcctggcatcttcacatctgacactgattcagagatcatggggcacataaacccaattaggatcacacatgtgcattaattaaacctgaaaagttcaactccctcccacctccccttgcccaaatgcccacacatgtgccaccgctcatcagcccttcaagacctaaatgtgcagctccagattttgaatttatgtcctgggatttgagagaagaaaaggtgttgaaggagcctccatgagaagatctttcctctggttttactctgcttgctgtaacccccaagaatgcagaggcacattgatcccacctagaatctgcacataaaagctggcctctgcctaggattcacaagacagggccagactttgggttgaagacatacagaaaactcacagaagacattttctgcatcataagaggtcaacatagacatcttaagcatcagtttcagagtggagccctttgagttttccagatcttgtccagtgacctgctgcagctctgtgagaggcttctggtgtcaacagaatcctgtaagttaaacaagcaccttagcagtgggaggtcagagctacaaaataaccagagccataatcacaactgtgcctccttgtaaactgttagtggagtagagtatttttgttcttccccttacctcagacttagctggacagggacgggatattacagctagattcgggatctgtcgctccaccagagcagaaccattttctataatatttgcaccccacaaagcctgagtgtctcctgtctcaggatcattatggaggcatcagcccatagtcactggggacgctctcaccagcacctgtgaattttggagacatttgaggatgtcctgtgcaaattggggtctgtctgactacaaggtttaattctgcccccattttagaggaagagaaatggttcagccagggtttgttcctcccctcacagaaataatttccttgatttgtacccagatgggagttgcttcagttttctggttctttggtgaaaaatgaggagatctggagactcaaactggtcaataagctaattgcttctatttcatatgtcattagaaaaagagatgaagcagtcatggtccctaccatgaaggaacttgcaatctagagcacatgaataagtagttgaattcagcatcatgtgttaagcacaaagacggaaggtgtagaggagacttaagcttcatttgggtcacatcccttgttttgagttttgatgccaccaactgaaggtctattcaaggacagaagagaagttattatttgtattgtttttaccttgctaagaataaatatttaccttctaatataattgctctaggaaaacgtaagggttttggttaaattccttcttatcgtatgttacaaaatagggaagtggctaaaatagattaaaattgcacaaactctgaaaatcagatttctcttggtcaggcttagaaaagataaaactgaaaattcttagcagcatggagatctgtcccaaccctgcgcagatccaccctctactgctaaactttctccaggtctgatcccacactgaaatctctcacagaactgcctagaggagatcagagtttggagtgactacccctactgcctctccacagctggtgctcacaatttcctgaaacccaaaaggagataaaaggggaaaaactatatactttggggccttaaattcttttttaaaaaattaggctgggtgcggtggctcatgcctgtaatcccagcactttgggaggccaaggcgggcagatcacttgaggtcaggagtgcaagaccagcctggccaacatgatgaaaccgcggctgtactaaaaatactaaaaattagctgggcgcagtggtgggcacccataatcccagctatttgggaggttgaggcaggagaattgcttggacctgggaggtggaggttgcagtgagccgagattgcaccattgcactccagcctgggcaataagagcgaaactcagtcttaaaaaaaaaaaaaaattaaaaccagtgtttctagagacatcccatccagcaacctgttctccattcctgcagtttcaatgatttcttcacaagtctcaaagtaaatacaaacactgaattgcagttaacagttcctttctatatctctccatctgtctaaaatgagctattattctatacattttattttaaaatcaatgataggaaaacagaagaaatagaaatggcaggccctgcatttaaatcctgggaagtgtgggacaattagtacccacctctgcagaaacctgttatgagaattaacacataatgtgagcttcccagcacagtgctctgtgacatactcctgagcacatagtacatgctccataaacattgcattaatgcttgtgcacatgtttttcaactgcagacttattcagacattgccattatctccagcctgtgtaaactatgtaaaagggcctgcagagaatgccaagtttcaggctgatgattggtggtcttttctttggatgaaggatatgtgtgttgtgataagggtgttgggataagggattctgtgaaaatttctgaagcttttatgaggaaaaaatccgtgcctgcaatatttataatttagtttaatcattaaaaaatacttgttcatcaaataatgagtatacaaattaacttaaatccacttagatgctcacataggatgaaagaaactttcagtatagttatattcatgacaataaatactttggtgttcagcttcctgaaagccaccttacactgcacggagttaaatttagtgcttgcaatccttgccactgaaagatccaaggaccagcagcatcaacattaccagggagtttgatagattcgcacagtcccaaatactgcaccagaattatggactcagaatctccattttgacaggatccccaggctgtgtctatgcataatggtgtttgtgaggctaggagctggtgtcagatctggtagtgcaaggcaccttcctcctccttgaatatttatagctaaatggtcagtttctctaaaccagcatataggtagggcaaagaagcattttggatgatagctacaattgagtgaaatgttaaacacatgtgattatattaaataattatatccaagtctcttactcagcaatttaattcttagtggcattttatcttgcaaacatttgccacacgttagtatgtgatttgtttacacctgtctcacttgaatatttggtaaaacattacttttactctaatcctgttgaagtaatagaaggaaatctattttcatgtactcactcattgaataagcatttaatgagcagaaaggtcaattaagagtctgttacattcttgctggcaaaagatggcaagggccaaaggtggggccagaagttctcgagcttttagatggagtcagcttcatacccaggcaggagggcaagggtacagagaatccacagaatctgaaggctcctacatactttatctacaatgttcttcatgtcattccactttgcgtacaatattgcaattattgctttaaatgaacaaatttctaagatatcctcgtctatccattcattacactgtaaaaaatgaattaaatcctttattatacaagcatcttagacagaaatcaaatgtaattcatcgcacatgctgtcagctaattaaagtatttgtaccacagattcctcagccttttatataaacttggaggagcactggggtcttattccaggagaaaagcaaatgaatctgcattttcctcttatttaatttatgccacaataacagtagcttcagtgcagagctgcagcttcaagctttacatttaccctggaaggtaaatgtgcaccttccgaaaactgcctgcaagtaaaaagaaggaaattacacgttaaaaaatttttaaattgggaagaactggtttttcctcctcctgctacattcagagttctgtcttaagtatcattccccctcaccttgctatttacttttctcctgatctcagcccagtgggaactgagatactggagaaagtctattttttccctagttttacagtgtgacagaagaaagtttaagtgataggcaaatgaaggaaatgcaagtcctcaatattcagaactaatttaccaggttcttggcatgctgagaaactcactaggtttgtggtctttttgtgaataagagcacattttcacctaggactggcaggtggtcacagctcagctaaagagagtcccattagacagctcattctgctgtcatgtaactaagtgatttttttccctgaaagtttatgtactatattctatatagaacactatatagaacatttgcgcctcatgcagggaactgttattgtggcataaattaaatttagcattttgacttaaaaattattgggcaagtactgtgtgcaggatgctcctaagtaattggcagtggctataaatactttaagcaatttttccaaccctatgctgggaagaattcctgccacaacatatcataaaggtagtaagggcagtaaagagccctagaagctcagtgttgaaagaaacatctaccggttatctagtgcagctaccttctgatgcttaaattcgcttctgcaatagaagggttgaatgctagtttagtctctgcttgactgtctgtggggacagggagctctccacttgatgaaagatctttagacctctgagacaccttagtatgtttgtgttctcacccccttatttcatggtatatcctttggtttaacataacaagtcgattccctctcccacattaggtccttttacatactttaagatacttatttttaattttcatgacatttctcttatagcttaaaaatcccaggctatttattattattatattatttttctcatatataacatggcttccaagtcttaacttacctggtcatttttcactagatgctaagttgtctcttttcatcttaaagagagattcttaacacagcatcattctcaggcatggccagacctgtagggaagaaggtagaacttactctttatcccactttaaatattctgcttttataaatagagcccccatttttattaattattgaatctggttggattgccacataatgtcttttcatactgctttgcaatacttcagacatacttgtatggaatctgaacattaatgtttcccatcaggatgaaagaataaagggactaagatagtacactcttgaattacaagctaagtctttgtattagtcttttttcatgctgctaataaagacatacccgagactgggaagaaaaataggttgaatggattcacagtttcacatgctggggaggcctcacaatcacggcagaaggcaaaaggcacttctcacatggcagaggcaagagagaatgagagagaagcaaaagtggaaaccccttataaaaccatcagattttgtgagactgattcactaccacgagaacagtatgcgggaagtcgccccggtgattcagttatctcccacaacacgtgggaactatggaagtacaattcaagatgagatttgggtggggacacagagccaaatcatatcagtcttaatttgaatctgaagcttgcccagcattttctcacgtcaccttaatttgcaaaagtggagcttgggtgaaatgaggaatgaaagtaagagagaaagagaaggaggtcatattgagtgtaaaaaatgtggcaatataatacaggagaaaaaatgtttgctgtggaatattaggggaaaaataacacaacaaatgagttctagtccgtgagctctcatttgtcaaccctgttgattttgggaaacatagataagttatctgatctttaattttgtgatttttgaagtgaaaaacactataatattgcataaatataatggaaataatcaaatgagatattaggtgaaagcatttatcttatattcatgtgtaatgcacacgttctttcttcctttctcatccttgcagtcgcattctcttccttttacgtctttcattccatttaggtgtcaaaaccacaagtctgggaaaggaataatatgtaagagcaaagatgcctactaggtgggcacatagagagctcctggtgggacagggactgcaagagaagagccactgcttggagagatttctcaaaaactctgccttatgtaaatgaatttcaacagcaaagtgatgacatatccacacatttaaataaaatccttcccctttccctggcagttaatatattgaaatattgtatcatgtttatcaaaggaaaacaccaccaaagacctgctttttattcttggcaggtgtccctaatccagaatgacactcttcccactgacctggacaggctttctggtatcaagtcccccttccaggtagccattaacaactattccaagttggcattagagactaaactagatggtcataattggtcctgtctaaaatgagagccatggggaatgcccaattatgattggctgtttccttccatgtttgtgtgtgtgtgtgggtgtcctgatgaggtggttctccagatacttgtatctggtatccagattttctctgcttctccacagcaagaaatgatgtagggcatctctaggcttgtcttttgcccctaatccagactcatgggtctcggggattaagggtcctccaccaattcataagaccttcacctattctccttgttaccatcatcacaaaacttctgtttctgattgctcctgctcctctcccatatttttatttgtcttagagaagaaaatacttgaattaatttaggttagttttttttctgagttgttggtacggtcttccttgaccttaatgtttttattccatgttgttatatgtactctgttgggctctcaagaatctttttattatgcaatctctaaaagtaacctaagaagtaaatttttatttgattgacaatgaaaataaatgtctctgcagtatgcaattatgacacatagattagttttgagaaagtatttggttggtatatttaatgttggacagtgcttctttaacaagtgtattaaaccactccaacaaaacttggtaagagaaagagtctccttcagtttccttcctggaacttaagctcatcacggtaggatacccagaatagaaggaaaattggcactttttcattgcttgactggtctgtcttacatctatcctgatgctggcttcaggcagaaaatctctctgttactagctttgaaattttcacaagatattgcagtaatatttagtgatgaagtagggcattctaaagaatatcagtaaggggttttcttcttcctcatagcacccataagaccttctctactcccccacatacaaaatttgtacctcagttttccacatgtgggtgcctggaatctttctcctatctcctgctgatgtgccccattagccaaacccacacagaagccagagaggcataggagaaacctggtgatgtaacccaaacaggcagccctcccaggtggagaacattttggagataggtagaaagtgaatctataggatcaaattgaaaatatgtgacacactcttcatctgcttatttattgagtacacacacacacacacagacatgctactttgctattaaaacacacaaacacatatatttaaaaattagcaaaaattgaagctaaagccaagtaatttcaaacttgacataataaaatcatttggatactaataattcagctatgtgcaaagcacttggtaggcactgcaagcagcagagatgtatgtgaggaaaagcagctgtttccaaagagcgtatagttaagcagtgaaatcagatagcattttatctcctagaaagcaaagtgttaagtgtaggtgaaacttggacagtaggatccagatttgaatgcaaatagcaacttctaaaatcagaaatgtatctttattagcaccgaggatgtgcctatttgaaaacagatgaagcaaatgaggagcaagcattctcttgggaaaaatgtggaccatacaaatccagcaatgacatgattaccgggaccccaaaatgttctgaaaccctgcgtaatgaccacctatgaggcttatgactcctctagagtgaagtttgcttaatctttttctctgatgtcttccttagttatcttctttttaaattagaaaaattaaaacgtagttccttggttttcaacattttttcaagtctggatgttaattttttcatgatactacatgaggtcagactcaatggtaaaatcaattaatgtattttgcttggaagtcattcttgaagtgaaaaaacattctgctatacttttggtttcagcctctctttatgttaatgaatactaaagaaaacaaaagtagccacctagttgcaaagcatgcgcttgttaatcacatcactacataaataaaataaggctatttacacaattgcaaagaatctctttacatttgatttactgttttccaagcagcagctcatgtaagagagatgttaacagattaaatttcccttagcatcattctacatcctcggtcaatggataatctactagcactggctctacaactttacttatttattttttaacttttattttaggttcagggttacatgtgaaggtttgttatgtaggtaaactcgtgtcacaggggtttgttgtacagattatttcatcactctggtattaagcccagtaccaaatagttaccatttctgctcctctccctcctcccaccctcccccatcaagtagaccccagtgtctgttgtttccttctttgtgttcataacttcttatcatttagcccccacttataagtgagaacatgcagcatttagttttccgttcctatgttagtttgttaaggaaaatagcctccagctccatccatgttcctgcaaaagacataatcttgttctctttgatagcttcatagtattctatggtatatatgtaccacattttctttacccagtctgtccctgatgggcgtgtatgttgattccatgtctttgctattgtgaatagtgctggaatgcattctgtgtgcatgtgtctttatggtataatgatttatatttttctgggtagatactcagtaatgggattgctgggtcgagtgacagctctgcttttagctctctgaggaatcatcatactgcttttctcaatggttgaactaattgctttacatctttaaatataaatcacgcatcatccaggtggcttacccaggactaaggaaggtttcctacacaaggtggaggagaaagtgctagaattcttatatgagaggacctcatggacagtctcttgttggaatgttaggacgttgggagaggagtagaagtagtagggcagtgctatgacgtagttcttatctcagaactgcttttagctggttatttaaatgagatggggaatagattaattgtccatatcaaagagtaatggtaggattctaatgaaggtgagatgggaaaatctctctccaagccaagtcctgatcaattaccaggttgtagaacatttaaaaaatgagatagattttataacagcctgatccttactttatgaataaagagataaagagaaatgtgttgggcaaaagtggagtaagagggcccacatttctgcattggatattaagcatccaggataatggctactgagagcagaaacaaatagtgtcagttctaaaattatccttcacttacttcttggagagagtttccaggctgcaaattaagaaagaaaaatataggcagaacccaacagtattcctgaataagaaaatgaagccgggattcctaggaggccaaagtacttatactttaaaaagaccgggtaaggaagagaaaatagatacatggagagagtcccatcaatctgcagagggcacctgttcagtcattatttgagtagtgatcaacacgtgtatgtgaggaaactacttgaggccaagaacaaagctgtatcagacaagcaagcagagggaaaaaatcctggcagcttgcataagatcaggaatatttcatgtgcctcatggccagaaagaaaaatctcataattctcgaggcattgaacagagtatttaagttctagttacagcaaaacaaagcttaaaaagcaagattggaaaggaaaataaatacttccaagtaatttaactgtatcctgtaataaagtttaagaatatttataggaattaaaagatacagcactgaaaaagtaaaattcacaatgtgtgtcatttaattaaaaaattaacaggaatacaaataagaaattacaattcataatgaagaaaaaaattaataaaacagacccagaaatgacacagataatagaattagtagtaaaggcatttaaatggccaagaggataaaagtttagtatgttaagcagagatataaatgtttttaaaaagatctaaatacaatttctagaaataaaaatatactatctgggactatcagattatgcactgcagaaggttagattagtaatcttgaagacataatgatagaatgtatcaaaaatgaaagagagacccagagaatgacatgctggtgagtggtgggataacttcagacggcttactctatgtataattgaaatcccaaaagacaggaaaaaaaaacattagaagaaataatagtctgcaattttccaaatttgatgaaaactataagcctacagatgcaagaagttcaaaactctccaagcacaagacatttgaagaaaattacatgaagacacattatgatcaaattgtttaaaataaatgataaagataatatcttaaaagcagccagataagaaaggcacagtgggtataaaagaattcaggtaagaatgaaaagaggcttcttgtcagaaacaaagcaaaccaggagacaaaggatcaaagtttttaaagtattcggaggaggcaatgattatcttggaattctacaactagcaaaaatatatttgagataggaagataaaataaaaggtttacatacattaaaaaaaaaactaaaagaatttatccccagtcaatatacactacaagaaatagtaaaggaagttctccaggcagaaggaaaatgatatcaaatggaagctggattcacagtaagaaatgaacagcactagaaatgctaaatatgtgagtaaatataaaattttaaaaaattattttaaaacatccttattaagtagttgactatttaaagcaaaccaataagattgtattgtggtgcttatatgtaaaaataaaatgtatttcaactataaataaaatttgtgggaggccattgttttggattgagctcctgcaccaagctccaacagaccagaccaaaccagaatggagttactggtgctaggcacccgtacaaattgaacttaaaaacaggccagttttccaaaaagcaaaagattcatgcaaccaatcaaaagggacccaggcaacctgaaccggcatgataaggaagccccctctgccttaacccacactaggaaagtaatctgaagtaacttgatgttaaccaatctgctgcttctactatattgtttccttgttcctgctcaagcgatttcacaaaaatctactgttctgccattcccagtggggcttatgtctatttatatactagatgctgcctggttcatgaatagctaataaaagtcaattagatcttcaaaaatcaatttttgaaattttgttttttgacatcaccataaccaaaattctaggaagggagaaattaaagtacactgctgtatgcaaagtggtgtattacttgagaatagactataataaattaaaattttgtattataaaccttaaagcaatgactcaaacaaaaaccgaaagaacagttatagcccttaaaccaaaaaggcagagaaaaaaaaggcaaaaaaaaaaaaaagagaaaaaaggaaaacaaataaatggaaaaaaaaacaacatagcaagttggtagatttaaacctcatcatcataataattacattaaataaattgcctaaacaacacaacccaagcaaaaggtaaggatttttaggttggacaaaaaagtaagacccaaatacatgttaccagtaagaagctaactttaggccgggcgtggtggctcatgcctgtaatcccatcactttgggaggccgaggcgggcagatcacctgaggtcaggagtttgagaccagcctgtttaacatggtgaaaccctgtttctaccaaaaaaaaatacaaaaaattagctgggtggcacatgcctgtaattccagctactcggcaggctgaggcaggagaatcgcttgaacccgggaagtgaaggttgcagtgagccaagatagtgccattgcactccagcttgggcaacaggagtgaaactctatctcaaaaaaaaggagctaactttaaatattaaaacagaaatgggttaaaagaaaaaagattgatagatataggtcatgctaactttaataaaaaagaatcttgggtggctacattaataccaggcaaagtagatttcagagaaaacaatattactgaggataaagagggaattttcatagacaatgtgttcaattcattaagtagacataataattctaaatgtatgtgcacctaataataaaacttgaaaacacatgaaacaaaatctggtagcatgacaaggagaaacaggcaaattcacaattacagtaaaatattacaacactcatctttcaatgattgatagaacaagtagaaaattattaaggatgccagaaggcttaaacaataccatcaaccaattagatctaattacaaattatagaacattccacaaaagacagccaaataattatttctttacattttttccagtgtactcgaaaaatttacctaggtaaaccttgttctgggtcataaaacaagtctcaataaatttaattcaaatcatacaaactctattctccgactacaaaggaattaaattagaaatcagtatcaaagaggtctgtgtgatataagctatttggaaatgatattaaatgcttttaaatctcctagttcaaataagaaatcaaaagaggacttacaaagtattttgaactgaaagaaaatgacaacgtattatattaaaatgtttacaagacagctaaagcgaaacagaaatttatggcactaactacctgtatagaaaaggagaaaggtctcaaatcaatggcttccacttccacctaatgataatagataaaaaaagagaaaattaaactcaatgtatgcaaaagaaggaaataaaagagtagaaatcaaagaaaataaaagtaagcaaaaaatagagtagtagataaaaatcaatgaaaccaaaagctggttccttgtgaattttgatataatgataaatctccagccagacatatcaggaaataaacaaatgagagagagacagagaaagagagagagaaggagtgagagagggaacaaatttaccagtataaagaaagaaaggttaatatttgtaaagattctacaataataatgaatgattgtgaacaacttcatgccaataagttcaacaactttaatgaaatggactttaatgaaagatataagctatcaaagcatattcatgaagaaatagattacttggatagtcttatatatatgaaagtaattgaacttatagctaagcacttcctacaaagaaaacttcagactgagatggcttcattgatgaattccacaaaacatttcaggaggaaatagtactgattccatataaactcttcaagaaattgaagagatcatacttttcaactaattctgtgaagccaatattaccatgatatcaagagaagaggaaacattacaagaaaaggaaactacaaactaatatctgctatgaacataaatgaaaaaattcacaaatccaatcctgtaatatataaaaatgataatgcatcataaataaatgggctttatccctgaaatgcaagattgttttaacattcaaaaataaattgaggggacttttattttcacctttgacacataaagaggttggaaacttttattcctgacctttcaacaagaaaaagctgaacaaaccgaaaatcaatgaattttcttggacctgtgagataattgagggctcagggtaaactgccaccagaaatctggaggtgaatacaggtaaacacaaggagtcccagcctaaatggaacagaagctactggagccctaaactgatagggacactaaaaatactaactttgatgaatccctggaggctgaatatggcctagtctgagagtgagaaacagctggagagcctgcatttttgtggattttacttggagttactcataatgaagagctgtgaaaaaccttgatgtttctggcaggggaggaaataagtaaaactttggaaatatggccagaatactctgttataaatgtctgctcagcaagagaaaagactttaccaggatgttacctgaggtggggggatagaaattacacaactgcagccttttgtaagcgtttctctataagggagaagggggaagctgagaaacacttgtgaagatcacactagtgacacaggcccacttaaagcctgagacttaatcataggatgacggactgcttccccttctccataccttactatcgcaacaagcctcacatataaaataacaatggatgatccaggcatggtggctcaagcctgtaatcccagcactcaggaggctgaggcaggagaatcacttgaacccaggtggcagagtttgcagtgagccgaaatcatgccattgcactccagcctgggcaacaagagtgaaactccatttcaataaaatggaatagaatagagtggagtggagtggagtggagagtggagtggagtggagcggagcggagcagagtggagtggagtggaatagaactgcaaggcacagactcttatttaagagcacttttagggaaacccaaagacaaaatagaagccaatttacaagagtacgagaagaaattgaaggctctggcatctgcagctatagcaaacattagacaaggcctatctcctagccagataagcataagacctgtcactaaaggcatatttacctcggatcgtattacatgatacatactaaatggttttcaaccaaaaaattatgaagtgtgctaaaaaagcaagcaaaaacatagtgtgaaaagacaaattaagcatcacatccagattcagatatggcatggattttggaattatcagacagaatttcacttgatctaagccaaaaggccaagaagtgatatcagacagaatttaaaataactctcattaatatgttaagaactataatggataaaatagagaacacatgagtactgtaaatagagacagctaaaaatactaagaacaaatcaaaagaaaatgttagaaaattttaaaaaaggcactgtaatagtcatacttttggtgggattatcagtaaactgtacgtggccaaagaaagaataagtgagcttgaagatatgtcagtagacagtttagcttagaaagcacaaaccaggataaaaccccccaattttacacctaagtatatctattaaactgcagaaaactaaagaaaaaaggaaaatcttaaaagcagccaggtgtgcaccttaactatagaagaagaaagataagaattatatcagacttcttttcagaaatcatgcaagaaaaaagagaagagagtaaaatatttaaattactgaaagagagacacaccaatatagaattccatattcaaccaaattatccttcaaaagtgaagaagaaataaagtctttatcagatgaacaaaaagctgaggaaattcattgccaacagaacttttctgcaagaaatatgaaaagaagttcttcagagagaaggaaaatgatatatattagaaacttggatttacataaagaaaagagcatctaagaaggaataaataaaggtaaaataaaatcttttatttttaaaattcttaattgatctaatacatagctgttcaaagtaataataataacaatatattaggtgattatagaatatgggtaagtggaatgaatgacagcaatgcaaaatataagggattcaactgatatgggggatgatctaggaagctgatattaccatgagggcaatagcacacacaggctttaatgggtaacacttcaacgggtttgatttttggggaagcctcttatagcaggaatctgtccagagattacagcatggggttggctactcagaagggaagaggaaaaaggaaacattttgaggagagggaaatggagagaaaacttactacctaggtgatgtcactcagcaacaaggaagggattctctaggtcagaaaactccaaagtgcgtagcagcttggggtcttataaccacaggcttgcttttgtcaatggccagcaaatgtgaggatatgtaaagcaagcagcctctcagtgactaaaaatctgcttgtttgagctattttaaaaataactggatatgtaaaaatttgagtttggccctgttgggcttttcagctagtgggtctcagcatgcagtgaagaaataagcaatctggggagcagtacacagacattatttttgacttatttatataacagtaaaggatggagggaaggattgggaatgcactattataagtgcaattaccttataatagcctattcccaattccttccctccatcctttgtatgaagctctataatgttatttgggagtgaacttaaatgctttttataggtatatagcaaacgccatggcaatcacaaattgtggtgtgtgtatgtgtatatttgatatgctaacagaggagagaaaaatggactcatataatgtgatcagttaaaaccagaaaaggcagacaaaaaggaggagaaaaaaagaaaaagcataacaaatagaaaacagttacagacatggtagataaaccaactctataaaaataataactgtaaatgtggaggtctaaacacatgcattacaaaatagaaattgtcagagtggatctaaaaattaaatccaactatatgttgcctataataaatatgctttaaatataaatacacagatacattaaaagtaaaggggtggagaaagatatattctgctagcactaatcagaagaaggctggagtagctgtattaatttcagacaaagcagacttcagaacaaagaaatttgttaagaataaaaaggataatataattataaaggagtcaattatctaaggagacataacaatccttaatatgtttgtgccaaataacaatgaatcaaaatatgtgaagcaaaagtgtatggaatgcaaagagaaatagacaaatccactattatacttgcagacttttacaaccctatttaaataatttacagatcatgtctaacttttacttgaggaaaccagagagaggaaagaaatttaggcctaaaagaagcagaagaaaagaatttatagtaattagagcagatatcagtgaaattaaaaacagaaaatattggagtaaatcaacaaaaccaaatgttggctcgttgaaaagataaataaacttggttaaattctagccagattaactaaaccaaaacaaacacaaacagaaaaagagagaacatacaaattactaatgttagaaataaaagaggggtcgttcttgttgattccatagacatcaaaaggatgataaagggatattatgaaaaacgccatgcccacaaatgtgatgaatagaatatacaaattcattaaaagacacgactacccaaaatcccacagggagaattatataatctgagtaagtctgtgtctattagagaaattgaactgtaattcaagaaagaaaacaccaggcccagatggtttcactggcgaattttaccaaaagtttaaggaagaattaatatgaattctcttcaatctcctcaagagaatagaagcagaaggagcatctcttacctcattgctatgagacaagcattactgtaaaaccaaaaccagatagagacattacaagaaaagaaaaccacagaccaatttatctcaagatcatagatggaaaaatcctcagcaaaccaaatccaacaatgtacaattatttaccaggaccaagtggtatttattccagttatgcaaaactagtattgtatttaaaaatcaattaaggcaacccctgacattaacaggaattgatcataataccaatcaaaattctagcaaaatcctattttatggatattgtgaaattgaagtttaaagtcagtttcaaagttggaggactgacatttcacattttactataaagttgtacgactatcaagtagagtggtgttttcaagaaatagactcatagatcaatggaatgtgatagagtgcccagaaacagacccatacaaatacagacaatggatatttgacaaaggaacaaaggcagttcatttttcaacaaatgctgctaaacaattggatgtccaaatgcaatgcaaagagagagagagagaaaagatttcaacagagacttaaatgtttcataaaataactcaaaatatgatcagtagtctaaatataaaatgcagtaatgtaaaacttttagagggtaggtgcagtggctcatgcctgcaatcccaatgctttgagaagccaagatgagaggatcacttgagaccaggaacttaagaccagcctaagcaacatatggagactctgcctccacaaaaaaataaaaaataatagccagatgtgacccacatctgtagtcccaatcgcttgcgaggctaaggtgggaagattacttgagccaaggagtttgaggctgcagtgagctatcatggcaccactgcactctagcatgggtgacagagtgagaccctgcttcaaaacttcaacaaccaaacaaacctttaggagaaaacataggagaaagtctacatgaccttgggtttggcaaagctcttttttttcccatgcacaaaaagcatgatccgtgggaaaaaattgataaattatactttatcaaaagttaaaaaaattctgttttgcaaaagtgactgttaagagaatcaagacacagactaacagaaaatgtttttacatcacataactgatacagaacttgtatccaaagtatacaaataactcttagacctcaacactaagaaaaaaacaacaagagaaaaccacaaagcccaacttaaaaatatgtctacctatttaatgcaatttcaataaaaattcattcaggctttttctttggtagaaattcacagattctaaaatttgcatgaaaagaaactgtgcgtaagtagccaaaataaatgaaagagaagaccaattttgggggcttatacttcatgatttcaagatttattataaaactacagcgaatcaagatcctagtgtaaaaatagatgatagttcattggaacagaataaagttttcagctatagacacataatgacattgacaagaaaatgaaaagcatttcacagactggaaaaacatttgcaaaatgtatatccaaacaaggatctatatctagtatatatgaagaacttttacagctcataagaacacaataagccaatttaaaatgggcagaagatttgcttagacacttcaccaaaaaagatctatagatggcaaataagcacatgtaaatttgcttggcatttttattaattagagaaatgcaaattaaaagaagctaccagtatactcctactaaaaaaatggctaaaattagaaaccctgaccagctagagcaactacaactctcatatactgctggtgggtttctgaaatggtacaaacacttggaaaattgtgggaattcttaaaagtgaatcatataacctagccattgtatttctaagtagttatccaaaatacctggaagcatatttctgtacaaaaaatgagttcataaatgttaattgttttatttgtaatagctaaaaacttaaaataacacaaatattcatcaagtaaataaataaattgaagcatacccatacagtgaaatattgcttattaataaaaataaatgaactccatatgctacaacatggataaatctaaaaattattatgctgactgaaagatgccagaatacctacttcataattgcatttatataacattttggaaaataggaagtaatctgtagcatcagaaatcagatcattggttgcctgtgggatagatggggtttgaaagggtgggaggaaaggcttaaaaagaaacaggtggaaactttgggaatacgagtgtgttatgttgattatggagacagttttatggattcatgaatatatttcaaaacttatcaaattgtaaatttaaatacatgcagtttttatgtgaaatcttgatgtgttttgtctttttaaaaacttgttattagaaggttgaattgctattacttaattattttcctctgttttagactataatcttttcaaagtcaggaatccattctattttttttaacttttatttttaattcagggtatgtgtgcacgtttgttcatagataaatctgtgtctgtgacatagatagacttttgttgtacggattatttgtcacccacgtattaagccttgtactcattagctatttttcctgatactctccctcctcccaccctccaccctcatgtagatcctagtgtctgtgtttgccctgtatgtgtccatgtccctgtgttctcatcatttactccacctgtaagcgagaacatgcagtatttgattttctgcccctcttagtttgctaacgataatgacctccagctccgtccatgtcctagcaaaggacatgatctcattcttttgttacggctgcataatattccatggtgtatatgtaccacattttctttatctgtctacattttctttatcaccacgcctggctaattttttgtatttttactggagacagggtctttccatgttggccaggctgatcttgaactcctgacctcaggtgatccacctgccttggcctcccaaagtgctgggattacaggcatgagccatcgtgcctggccaaatgctagtgatttttgcacattgattttgtatcctgagacattgttgaagttgtttatctccttaagaagcttttgggaggctgaggcaggagaattgcttgaacctgggaggcggaggttgcagtgagccgagatcacaccattgcactccagcctgggcaacagagtgagactctacctcaaacaaaaacatacaaacaaaaaaaaaaagcttttaggctgtgataatgggttttctagatatagggtcatgtcatctgcaaacagagatagtttatctttctcttttcctatttggatgccctttatttctttctcttgcctgattgccctggccagaacttccagtactatgttgaataggagtggtgaggaaggacgaccttttcttgtgccggttttccaagggaatgcttccagcttttgcccattcagtatgatgttggctgtgcgtttgtcatatgtggctcttactattttgaggtatgttccttcaatacctagtttattgagaatttttaccgtaaatcgatgttgaattttatcaaaagccttctctgcatctattgagataatcgtgggtcttttgtctttagttcggcttacgtgattaatcacatttattgatttgtgtatgttgcaccaggcttgtatcccaggaataaaccctactagatcttggcgcataagctttttgatgtgctgctgaatttggtttgccagtattttgttgaggatttttgtattgatgttcatcaagaatatttgcctgaagttttctttttttcttatatctgccaggttttggtatcaggatgctgcttgcctcataaaatagggagacgtctcatctcaatttttttttaatagtttcaataggaatggtaccagctcttcttggtacatctggtaaaattcagctgtgaatgtctggtcctgagttttttttggctggtaggctatgtattactgcctcagtttcagagctcattatcagtctgttcggggattcaatttcttcctggttcagtcttaagagggtgtatgtgtccaggaatgtattaatttcttctagattttctagtttatgtgcatagaggtgttttgcaatattcttctgcctcagcctcccgagtagctgggattacagccatgtgccaccacgtcctgctaatttttgtatttttagtagagacggggtttcaccatgttggccacggtggtctcaaactccttgaccgggttcaaactcctgacctcaggtgatccacccacgtcggcctccaaaagtgctgggattacaggtgtgagcctatgcacccggcctccgagtcagcttttctaaataaaattatattggaacatggcagtaccagggcagaggagggcagggcaatgcaggactgggccatggcagcgcttggtcaactccagggcagggccagaagcagcacagggccagggccaatgctcaggccagggacagggcatggcaggaagtgccagagcagggccaggccaacattggggcagggcaaatcaggtcaggacacctccaagtccagctctggccctgccttggccctggcccctccctggcctgaccttgtccctggccctgccctatccatgccctgtgtatttgaccaatgtttcaaaaccagaatcctaccaggaacttaaacaaatcaactacttttgtgcatttttagtagagacagggtttcacaatgttgcccaggctggtcccgaactcctgagctcaagccatctgccagccttggcctcccaaagtgctgggattacaggtgtgagccactgcgccagtccaagtatttaacctctttatgcctgtttcctacatttggaaaatggggatactataagtaactagcacacagagttattgtgagaattaatgcctcacatatatacatatttatatagttatagtcatagaacagtaccagaagcaaagaaagtattggttaaaatttagtgattattaactactgcaaatattattactattacaaacaacatagtatagataatattattactagtatagttatcttaaaaatctaaaaattttaactaatatcctaatgtaatctctcctgctctgccctggccctgccctggcttagccttagcgctggccctgcccctagtcctaccatatccctggccctgacccttccctggccctgctgctgccctggtccttcccatattcaggccttaccatggccctccactggtcctgaccctgccctggcctggtcctaaccctggcctacccctgtagaacagagaaggggtagggaagatccagggaagggctggggcaaataaaggacaggacacatccaagtccaggaaagggctagggccatgacagagccagggtgagtccttggcagggccagattccaggccagggccagggaagggtaatggcagggtcactgtatggccaaggttcaggccaaagccagggcaggggcaggagcaggcctgcatgagggcaggaccagggccagggatgtggcaggaccaggggcagggccaggaccagggctgtgccaggacagaacaagagcagagcagggcagtaccacaaccaggccatagagagggcagggcaaacgccaaggcaaggccagggtagtgccagggctgaggcaaggtcagggaaggtccagggctgagtcaagactagaaccaagacaggggcaaaggccggggcagatctagggcacaagcaggccaggctagggcagggcaatggcaagaccaggccatggcagggccagccctggatagaacagggcacaggcagggcagggccagggacgcggctgggacaggacaaggaccagggcaagggcatgcccagggcagaggtagggccagagccagggtctgggcagggacaagtcaggtccattccagggccagagttcagaccagggccagggcagggccggggcagggccagggccaggaccaggaaagggcaatgtcaggaccagggccatggcaggaccagcaacagggctagggcgaagacagggacagggacagggtcagggctagggccagaatagcatgccagggtagggccagggcaaatcagggccaggacagggtcaggcccagggctaggccaggtatggccttaagcagcgaaggccagggccaaagtccatgccagggccagggccagtccggggtaggagcatggccatggccaggtctaggacaaggctgaggcagggccaaggtctgcgtcaggcccagcaaaagaccagggcagagccagaggaggagcagagccatggtagggccaggacagggatgggccaaggcagagccaggttaaatcagggtcaagacaccttcaaatccacttcagagccagggtcagggcagggcgagttcagggtcacggccaagggctggggctgtcaggatcattggcagggccagggccatggcaggactagggtcaagagcagcggtcaatgccgggccaaggccagaacgaggaccaggtctatgctagggtcagtgcgagggccaaggtggggtcagggcagggccaaaggcagggcagtgccagggcagggcagggtggagcaggcccagggtagcacagggtgaaggcagggcatggccaacaagggcaggtctatggcgggggcagggccagggccagggcagagccaagacagtggcagctccagggcagggccagggttaggaccacggacgtgtcccagtgtccaaggccagtgccagggaaagggcaagggtagggggcagggtcagggtcatctaaaaaccaaggacaaatctaggcccagagcagggccaggataggtacctggcagggccagggtctgggacaggaccatggcagggccagggccacagccaggtctgtgctatagccaggtacaagacagggcccaggccaggctagggtgaaggccaaggtagggccagggcagggtcaaagccaggctaggaccaaggcagggccaggacaggcaggatgggtccaggaaagcatagggccaaggcagggcagggccaggccagtgccaagacctggacagggccagggaacagccagggcagggacagggccatggccatggcgtgggcaggaccaggttcggggcaggagcaaaagaagggcaaggacagtgcaggttcttggcacagccggggtccaggacagggtcagggcagggccaaggcagagtctgggccatggtaagaccagcaacagcgctagggctaggatagtgacagggtcagaatcagggcaaggaccagagcagtgcaaggacagggtagggccagtatttcagggtcaggacagggtcagggccagggcagaaccagggtaaggtctcaagccaggaagggccagggccagggccaggataggtccaggggctgcattagggcaagagcagggccagaccagggtaagggtcagggccagggccaggatagggacagggcaagaaacatggcaggaccatgggcaacaccaaggccagagctgagccagggctgagtcagagctgagtcagggctgagtcagggcaaggcatggtatggccagtgcaggacaggaccagagccggtccatagagagagcagggccgatgccaaggcagagccaggctggtgccaaagctgaggcagtgtcagggcatgtccagggcggggccggggccagaaccgagccagggcacggccaaggcagggtaaggcagggcaatggcatggccgggtcagtgccaggatgaggcagaacagggcaaggcaatggtaggggcagagcagggacaggccaaaacagggtctagtcacttcagggccagggccagggccagggccatggcaggacaaaggccagggtcagggccaggtctgggctagggccaggtccagagcaggccgtagccaagactagggtgagagccaaggtagggcccgggcagggtcaaagccagagtagggtgagggcagggccagggcagggtgatgacacagccagagcacggcagggcaggttggtgccaagaccaggggcagactactgccagctcagggccagggaaaggccagggccaggacagaaccaggaaagggtctgggtcagggccaggagcaaggcagagcagggccagggccatgatagaatcagggcaggtccttagcaggatgaggttccaggccagggccagggcacaggcaggggcagggcctggataagggcagggtcagggatatggcaggaccagggtccaggccagggccagggtccaggctgggccaggacaggaccagagccaggccatagtgagggcagggcaaaagccatggcagggtcagggcaggtccagggagcggccagtgccaggcagggccagggcacaaccagggcagggtaaggcaggtcagtggcaccgctgggccatgacagggcaaggtcagtgccaggagagggcagaacaggcagggccatggtggggccagggcagggacaggccaaggcagggccgggacaaatcagggccaggacatgtccaaggccaggtcagggccagaacaggaccaggaccatgaccattggcagggccagtgccatggcagggccaggatcaggacaggaggcagggccagagccaaagctgggtcagcgcagattcagggaaggtccagggcagaggtggagccagggcctgagccagggaagggccagtgcaagggcaggaccagagcagggacagggtagcaaagggccaagacagggccagggtgggaccagagcagagcagggctgagacagtccaggtaatggtagggcaggtccagggcagggcagggcagtacagggccaggtccacagcacgggcagggcatagccaggcccattgtgaatgcatcagccctccctacaaggctcctaccacctggccgctgccacagcctggccaccgctgtaggcctgccccaaccctggccgcagccacctgccctcctaccgctccagcacactgcagtctgcattgcccccacgagcccacagagaagtgagctgcggcgttgcaggctccaggtgtctcctcctactcctggcacggagcagctgggacggcaaagccagaaaatcctagaggaagatgcaaggggtggtagcgtcagagcctcactttgtcatgccagccactgggtggcaggggccagtttcagtgaaggcactcacagccacccttcaaagtccagcctctccttttggcccaagctggccagaaaccgggacctggggtgggtgctggagacaccacagtgcctggctcctcactccacaggaactgctgggcccacctgggctgcactcctcgggaagcaggagcagcagaaactcagacccagccaaccctctgcacccaggtgccacttcctgttccggatgcctccacatacagggccctgtcctcagtggtgtctgctactccatactggggggtgccaggcagtctctgtggcacagactcagagtgcatgggcccaggaaccacggtgggtatgggggctctgccatgctcaggatttccacagaaacactgtgtgtctgccacgctccagtatgagcaagagtaggttgccctctggagtgtggagtccagggagaggagaaccgctccttccttggatgccaccactgtcactgccaactctgctgaccgtcaccagcagtgcagcccccaacagtacccaacttgcccccctccatggctaatcctgccctcaatagcgccccccacctccacccccccccccaacgccaccagcagcgtatacccaatagtgccctaacctgttctcctctatgggcactgcagcaccagagagcgcccataacactccccccaccatgggcagtgcagccccatataatgctaccaaccagtacccccaatgcaggcagtgacaccctagatagcacccccaacccaccccacactgtgaaaagtgcagccctgatagcccctgtcctaccactctggtcatgctgcagtctctgttaccaccaccaccagccacagtgaggcaagccactgggccgcaggctctagcctccagcagctgggcagggagcagctcttgctgatggcggcctgctaccactccaaccacgctgctgtctccatggccatcttctttgactacaaaagaataaaactaggtatcaataagaagagtaattttggaaaccatacagtcacatggaagttaaacagtacgctcctgaatgaatgactagtcttagtatcaatgaagatactaagatggaaattgaaaaatttcatgaaacaaatggtaatgaagacacaatataccaaaacttatgatatgccaaaaacagtacaaaggaagagattcatagctgtaagtgcctaccatccaaacagaagaaaaacttcaaataaaccatacatcttaaagaactagtaaagtaagaacaaactaaacccaaaataagaaaagaaataataaagatcatagcagaaataaaattgaagttaaaaaaatacacaatattaaacaaaaagttggttttctggaaagctacacaaaactgacaaacttttagccaggctgactaagaagaaagagagaagattcaaataaataaaatcaaaaaataaaataggagacattacaactgatacttcagaaattcaaaggatcttaactggctattatatgccaataaattggaaagcctagtagaaatcctagacgcatacaacctacctagtttgaacagtgaaaacatccaagaccagaacagattggtaacaagtaatgagatcgaaaccatcagaaaaagtctcccagtaaagaaaatccaggaactgatggcttcactgctgatggcttcacaccacacatttacagacctagtaccaatcctactcaaactattttgaaaaacagcagggaatacttccaaacttattctgtggggccattattaccctcataccaaaatcagacaaagacatcaaagaaggaaactacaggccagtatctctaatattggtgcaaaaatcctcaacaaaataccagcaaatcaaattcagcaatacattaaaaagataattcatcaggatcaagtgggatgtatccctgggatgcaagggtcattcaacactcaatgtgatacatcatatcaaccaaataaacgacaaaacagtatgattatgtcaactgaaactgaaaaagcatttgatgaaattcagcattccttcatgttataagtcctcaaaaaaccaggtacagaagaaacatactgcaacataataaaaaccacatgagagagactcacagctagaatcatatggaatgggggaaaatggaaagcttttcctctaagatctggaacatgataaggatgcccactgtcaccactgttacgtaacatagtactggaaatcctagctaaagcaatcagtgcagcccctgatatggcccccaacccaccttgcccgctgccaccagcagtgtagccccccgatagcgcacccagcacacccaaactgccccctcttcccgcaccatgggcattgcagcaccccatagtgcctaaacccaaacccccccccgacccgcacccccgagcagtgcagccctggatagcacccttaacccacctcactgctgccggcaatacagtctgggatagtgcccccaactagcaggcctagcggttttctttcatccaatcagaacataaagtccaggaacctggcttgcataacctcagtatataaagcatgctaagggggagttgcgccattgcaggctgttgtacctcagcgttcccagcctctcagttcgcaccttagagaaggcgaaagcagagtcccccgccacacgctgggggctggaggctggatcctgtggcaccagggcttgcctctgcatagtgtgtggtggtgatggagacaggcgactggcagcgagagctgttccttgcctggatacaggaagggaaagaggaggcacctaccacaggctggaggctagagtctgtgggactgcggctggcctcgctggctcgcctcgctgctgtgggtggcagcagcggacactgcagccggccagagcgtagaaaggtgatggggtagatgcgctatcccgggctacattgcccgcggccgggggctgctaggggtgttattccgggcgtcactactttaggtgtgctatcccgggctgcgctgcccgcagcagcgggggggggggtaggttgggggcactatcctgggctgtattgccagcagcagtagggctggttgggggccctattgggtgctacactgcccgcgacagggggcgggttagggccgctactgtggttacactgccggcggcgccggggtggggggactggtctgggtgctgactggtctggcttcattgcccatagtggggtggggggtggtatgggggctgcaccgcctgcggcggggggcttgttgggggcgctatctggggctgcagtgccccccgcaggggataggttagggggagtatcccgtgatacactgcaggtggagtggggcgggaaaggggggtacagggaggtgattggagggggtggtttcaggcgctatcgcgggccagactgctcatgatagaggggggcgttgggtgcgctattggctacactgccagcggcaagggacagtttgggggcgatacccctccagtggtgggtgggcaggtgtgatgggttgtgggcaccattagggggctgtactgtggtcagtgggagcgagttaggggagctatcagctgctgcactgcctgtggcgggagtcaggtttggtgcgctatcgggaccatattctcggtagtggcatacgggttaggggagctgtcgggggctaagccgtccacggggggtgcgggttgggtgcgctatccagggcatcacaccccgcagctggggtatggttgggggtgctcttcgctatctgggactgcattgcccatcgtggggagcgggttgggggccttaaggatccgtggctgcactattcacggcggggatcaggttgcagcgctttctggggcgtcgctgcccgcggcaggggggttggttgcgggtccaatccgtggctgcatggcccacggcagggggcaggttgggggagttatctggtgctgcaacgtctgaggcggggacgggttgggggcgctgttgggttctacgctgcagcggcgaggggagggtgttaggggcgccatcccgggtccaacagctggcggcgggttaggggcgctatcggggtgccctgaaggacactctggtggccgcgaagtgcccttgccagcacccgatctcccttccgaggagaagcagggcgggccgcaaggccagacaggccatcctcctcaggccgggctggctgagcgcgtgcgattctggggctgcccaggcgagcccaggagaaccggcgagcccagcggcgcctgcccgcagctgcacccccacctgccagcgcgtgccgcttcccagcgacttccgggagcccggcggccaccgcggtgcaggcgcgcgcccaacggctttgccaggctcactcggtctgagaggtcggaggctgcgagtgtcgttgctgaaggctgtagtggaccgggctggatcgcggattttggagatcatagatatcggatcgcggattgggagttggatctcggattgggggttggatcggggatttggggttggataggtgatttggggctgggtcggcgggggcggggggtggtagtgaaaaggtgacagggagctgccccctctcaagagccggtgattgggggtctgagaagtcaccaccatgaagttgttcggcttcgggagccgcaggggccagatggtcctggactccatagaccacgtctacacggcttccgggtaccgaatccggcactccgaactgcagaagatccacaaggcggctgtcaagggcgacgccacggaggtggagcgctgtctggcgcgcaggagcggagacctggacgccctggacaagcagcaaaggtagcgggggctcagcccggggtgggagggggtccccaggcgcggctttccggcagcccctgggacgggggccttggaggtcgccgggcaccctctgagcggcggagccaaacggaccctgagctgttttccatcccttataattccctggctggagcagttggtggagaatttgagtgatttaactcacaaatttaagcatatacagtgttgttatttttaacgtacacgtttaaaacatggtatatatacattataggaggtgcctgatgagagaactcatttccctctcaaaaataccgtgagttattttcagtaggcgaaaagttctcagataaaactgtccgttttacatccgtatccccctgtgtaggtaggttctttactgaaggttcttagagagaaacttggaagtgggaggtggcttctgtgttcttgaatgggaaggcacatttttcccaacatgtgagctctttctgtgttaatcagttttacatagaccgaatgaaaatatcaaggttttaagatttttgtatgacacctgctgtctttcgctattgtgatgacattttaaaaaatttcataatggagtgaaaaaacacttgctcctctagatagcaaaatgtgctattaatttctacaattaattgtttactaacagctgaaaagacagataaacgcatggaacagaataggcaacccagaaacactaaaattatgtaagatatacataaggattgatgagtaggaaaggatgaattattaataaaaaaagtctgctgtttgaagaaaactaatgaaattttatgtcacaaacaaagttcctgatggaatacagattgaaatttttacatatgcaaatgagtaaagtaccagaagaaaacacaaacgcttattttgcaggtacactttatgttgacaaaagccttcctaagaatgacctcataagcagacattctgaaggttgatttagcaaactaaaaattaaaactgcctgtgtttcagaaaaaaaaaacaacaaaagagaacttacttgaaaaatattaactatattatatatatattcaaatgaaatgtatgttttcattttatagggaattcattatatatatatatatatatatatatatatatatatatatatatatttttttttttttttttttttttttttttttttttttgagtcagagtctcacttctttgcccagggtggtgtccaatggcacaatcttggctcactgcaacctctgcctcccgggttcaagcaattctcttcgctcagcctcccaagtagctgggattacaggcaggtgccagcatgcctggctaactttggtatttttagtagagaggggcttcaccatgttggccaggctggtctcgaactcctgagctcaagtgatctgcctgcctcagcctctcaaagtgctgggattacaggcatgagctacggtgcccggcctatattgtttattatgtatcgtatgatatatatattattgatacatataccatatatattattacagatataatctgtaatatatatatcagttgtatatacacattagatgaaaagttgtatgtatatatacacattagatgaaaagtacattttcattttacagggaattctttcaaatctaatcatcaaaaactctaaaactgggcaaagtacttttttccagatctacaagttacttgtgtacgtaggaaaaagtccttcacatttctagtataagaatttaaaataaaagaggaatgaaacagttttctatccacaatatttgtgaggatgttttacactcctgcttaaagtctaagttgctgattacttttcaaataggtaatttggtggtaagtactacatttaaaaaatatgtatgccctttacccatcaattccattatactaaaacacacttaggaaataaagatacatgcactttattttttgcaacacttattttaaaaagaacccatagaatggatcctataaataaatttcagttgcatccgtaggatggaataatatgtgaccgttgaaggtggcaatagatacagaagtacattgatgtgtgaagatgtattttgttatagctagcgaggaaaaaaaatcagttaaattatacatacacacaaatatactatggtcttgttttagcaaaaaatatgtacaaaatataaaatttgtaatttctgagcaattgtattttaagtaaagttcttttcctttttcttatctgtgattgctgcagtgagcgtgtacaaagcttctagtaaagtttattaataaaggaataatccttgggaagagaggaatatgaatcttacaatattaaaaataatttctcgctttctatttttatcattattttgtgtattgttatcttctttgaacttttagcctcttcagaagtaaaaagggaatgtttttatctgtttccagattttattttctgtatatattattatgaacatggttttcttatatattcactcaatttatgcaaacaatgatagattaataatttcatttcaattgtattctttaaaaataaaaataatatataaatactattgcaaaaatattgctttataggagtttatttaaaaatatcgatctccccaactgtatttatccattctttcattccatttattcatcaaacataacctgagtacctgttatgtagcagacatattctactatctctcaggacgcttctatccttaaaaactacatgtttacctgccctgcctgcacaagctgagagatttaatataggaatattgggacttaatctccttgaaactttatctcccacctttcaaacaaaagcatttctgaacttagaaaatagtagaagataacctttaactgctctttgaaaagtttatcagtcttaaatactaatattaatcattggaaagtgttatttgcatatattctgtaagtattataagtattgaataaaatgagccatgtgtattcatttgaatcatgagtttcctttggcttcaatttgtttgaaaatgaaggaattaatttttttaaaaaaatgcattattgttatttcagtgctctttccccatagtacctttaagaactaaaatgtatttaagtgccagttatatgcctagaactgccctagacctgctgagtataccatattctacttaatgtaaggtctcatggattgtgtgataccccgctattttatatatcaataagataatttttaaagtgctaccaattatagttataataatataagtggcattccaatgtcagaggtattaaaatgtgacctactctttaagccatcctgcaaagtaggtgtaattgtatcttttacctaattaaaatgtttttgttaagtagtaatagtaacaattataatatctggctgggtgcagtgactcacacctgtaatcccagaactttgggaggctgaggtgagaggattgcttgatgccaggagtttgagaccatcctgggcaacaaagtgagattcttactctacaaaaatttttaaatagctgggcatgctggtgcacatctgtagtcccagctactcaggaggctggggatggaagatcgcttgagcccaggagttccaggctgcagtgagctatagttacatcattgcactccagcctgggcaaaagagtgagacttgtctcaaaaacaaaaatcttacaattattgagttgtaggaactattctaaatacatagcttctcatttaagcatcacgatggtgtcctatgagatagctactattgtcatcttcattaatgaggaagttgaggcacagaaaggctaagaaatagttggtaagtgacagggtttaaagtaggactcaaaccctaattgaactgaatccaaagactgagctctttctattcaaataggctgctgttttcattaaggcaatgagcaatcagagctagtaagtattgtactttcttcaaaaaaaaaaaataagtatttgttttgaaggcagaggaaaaacatgctattcattttttacagttacatgaatgattgtatgttttgagatgttgcactacagtttcctgaaaagtcctcttactctcatagaactgctctacatttggcctgtgccagtggccatgtgaaagtggtcactctcctggttaacagaaaatgccagattgatatctgtgacaaagaaaatagaacacctttgatacaggtatattagagccaactcttttagcatgacatggatttgatttgcatacatagaattaaaataaattgatctcatttacatataactagttggtgaaacctgtggaatgtgtattttgaattcttggaatttacaatctatttcttggtctaatacggacaggctgtccattgccaggaagaggcttgtgctgttattctgctggaacatagcgccaatccaaaccttaaggatatgtacggcaacactgctctccattatgctgtgtatagtgagagcacctcactggcagaaaaactgcttttcaatggtgcagatattgaagcactggacaaggtatagatcaatcaactttcttcccaaaatatttgttttaacattgacataggtaagggtcatttttttatatttggaagctcaaccattccctgaatgcaaatgcaaattattttgaaataattgtctaagattttattttaaatattgatacttttaaaggagcattaaagggtatggctttataaaatgcactttggaaaatatttgtgaatttgttaaaggtaaaactttttcaactttttttctgtggagggttattctttcctcccccccccccccccagttagtgtaaaacaacacaggaaagaaattatgccctggaaataggctttatcttaaaactcaaacaaaactaaagcaacttacaataagtggatatgttgctgctgctaattttctgaaaaaccgatgtatcatctctcagtggcacaaggcttaacaggggaaaatgggaagggaaaaggagagcaatcagaaatatgcaggtcacttggaaattaggtaatgagcgaaaatgccaagaatagttttttttttttctcttagtttgttgttcttccagtttatgcctaaaacttaaagtatagtaataataataataataataaaagcacccccaaagcaaccaaccaatccaagaaaaaatacgtctcagggttctgttggtcctcttgcatgggcggccctgcccccctgttctggcctggctcaagcaccctccaccctaccccagcctgctggaaggagctctgtctaccagagcagagggctccctctcccaggctctatcactctggctctctagctctctcaccctctctctatttctcttatttcccctccatctcatgctctttctgtcactctctctctctccttcctgtctctctctatatcgtggtctctctccctcagtttctatctctccatcctctttcccttgctctccttcaagctgtatctttgtgtatctgtgtgtgtctgtgtctgtgtgcccgcgcgcatgcacccatgtgtgtctgtgggtgtgggtttgctcgtggtggtggtgaggtgtgtctggctgtccatcagcctctctctcctgggatcagtctgccagctctagtggcagcgccgggcaaagcagctcctcccactcacttggccacgggccatgtccttgtcgggacaagcgacgctgttagtgacattgtgagagaaagggctcgtagggctagggcggctgttcacccctgggcagccctggtagctctgggtgggtgaggaaagagggggccttgcaggtggggcggcaagggaaccaaaacaatccctcgggcggcaaggaggaggacaggagggtatcccaggaccgtgggcccagggccctgagggctgggagcacaaactgtcctgagcaggcgcgatgtggtggaagcttgggagctcaggagcctggggaaggcctggagcgtcggaagaatggaggccacccagagagcccgaagtctgggcaggggatggaaacctctggcgtccccactcaacagcagggtgccaccacggcggtccggtgcatggcctcgccagcgatggcgggaggctcttggaggccggcggaaggtccagcgcggagacccacagtgctggggcgtggagggggagagcagcccagcagcgggcgagtggctcagaggtgaccgatcggagccccgcggccctggagtggcggtgatgcctggagccaggcgggcgtggccgggcccggctcttgtgtcagccaggtatcactgccgctgtctaaggccttaccgccctgaagacgcctgctctcctctggtctgtgaagctacgcagggtggggcttgtttcagtttgagggagaccgcgtgggactactggacgctgtgggcttttggcttcccgctctctccctctttcccccttttgttgctctgcctcccaaccaccccctgactctgctaccccttttccggctgcctgagtccccatcgcaccccaggacctcctcgtgggggtccaccgctgcagtaccgccaggcagcagcatcccacctcttccgccttgctgcagctccaccaggtccccggctctagccaggccggggcaggccaggaccagacccccaaaggcacaggcccaggttccctgccatcctggttatcttcctgctccaggaacgcccacgtaattcaattcactcatctggcgccgccgcaaacatccaagcctggggaagttgcgggcaggggcagagggtcccacagatgccagccaagagctcctccagaacgcacgggctgctttttccagggaaggacattgcctttgccagctaccaggaaaacgtccttgtgaacccggattcccattgctaccgacttcgtgtaaactcccgtcccgaggacacgagagagactcaggcctcaggcgaggattccctggattgcacccagggtgcgtgtctcgcccacaggagcaccccaaagcggcaagaagacaccgggtgatgggaacaggaagcctggctttgaagaggacgttgaggcagtccgtggaaaaacttcccagggatgacagtgccttcccgacagaccctgcggcagaatgggagggggagcgtggagtccctgtcttgcacccagggtgcttgtctcgccctcagggggcaccccatagcggcaagaattcccccagagaaaggtaacaggatgccccgcttgaaagacatgcaccctgggtgcaagccagggacatcccacgaccaccccgggcccggcacagagactgcagggaaggcactgtttttcgtgggatttcccgcacccccccccggactgcctcaacatcccctttcaagcctgacatcctgttcccttccaccagggtacatcttgccgctttggggtgcccgtcgtgggtgcgactcgcaccctgggtacaagccagagactccacgaccaccccgggccctccgcaggggctgccgggaaggcactgtcgtccgtgggagggcctggcccgccacttcttcccccgtgctgcctcaacatcacctttcaagcctggcgtcctgttcccttcccctggaggtcttcgtgcccctttggggtgccccccgtgggcgagatacgcatcctgggtgcaagccagggactccatgaaaccctcgggcccagggcaggggctgccaggaaggcactgtcgtccgtgggagaaccccagcgttgatgttgttttccccgggctgcctcaatgtcccccttcaaacctgaagtgctgtctccttcccccgggggcctacttgccgctttggggcgcaccccgtgggagagacacgcaccctgggtgcaagccagggactccccgacgccccgggcctggcgcaggggctgccgggaaggcactgtcctccgtgggaggaacccggctcgccactttttcccccgtgctgcctcaacatcacctttcaagcctggcgtcctgttctcttcccttggaagacttcttgccactttggggtgcccccatgggcacaacacgcaccccgagtgcaagccagggaatcaacaacccccccatgcccagcaaaggggctgccaggaaggctctatcatccaggggaagttttttcccggactccctcaaagtccgctttcaagccctgcgtcctgtttccttcccccggagctttcttgccactttggggtgcccccatgggcgcgatcggcaccctgggtgcaggccagggactccacgacaaccccgggcccggcgcaggggctgctggaaaggcactgtggtccgtgggacgaccgcggcccactgctttctttcccgtgctgcctcaacatcccctttcaggcctggcatcctcttcccttcccccggaggccttcttggcgctttggggtgctccccgtgggcgccacacgcaccctgggtgcaagccagcgactccacaaccccattgggcagggcgagaggctgccgggaaggcactgtcgttcgaaggacctgcctcgctaccttttaccccgggctgcctcaacatccccttttaagcctaacgtcttgtccccttcccccgaggaccttcatgccgctttggggtgactcctgtgggcgagacatgcattctgagtacaagccagggactccacaacaccgccgggcccggcccaggagctgccaggaaggcactgtcatccgtgggaccaccccagccgcgctgctttttttcccccggctacctaaacgtccctgttcaagcctggcatcctgttgctttcccacggaggacttcttgccgctttggggtgccccctgtgggcgagatacgcacactgtgtgcaagacaaggactccaggaccctcccgggcccagaatagggggctgcagggaaggcactgtcgtccgtgagaggacgccagccttgccccttttttccccgggctgcctcagcatcccctttcaagtctggcatcctgttcttttcccctgggggctttcttgcagctttggggtgccacctgtgggcgaggcacgcacccagggtgcaagccagggtctccaagaccccctggggccaggcgcaggggctgccgggaagtcactgtcctccgtggaaagtttttccctggactgcctcaaagtcccctttcaagcctggcgtcctgttccactcccccggagcccttcttgccgcattggggtgcgcttttaggtgagacacgcactgcgtgcaagacagggactccacgaccccccctccccctgggccaggcgcaggtgtcgtccatgggaagtttttccctggaatgcctcaacatcccctttcaagcctggcgtcctgttcccttcccctgggggccttcaagcctggcgctctgttctcattccccaggagtcttcttgccgctttgaggtgccccccccatgggcgtgacacgtaccctgagtgcaagccagggactccacgaacccacgggcccaacacaggggctgcagggaaggcactgtcatccgttggacgaccctggcccgcccccttttttttttccgtgctgcctcaacgtcccctatcaagactggcatcctgttcccttaccccggaggacttcttgccgctttggggtgtcccccatggacgtgacacgcaccctgggtgcaagtcagggactccacggcttcgcaaagcccggcccagggtctgctggcaggcactgttttccttgggaagttttttccccggactgcctcaacgtctcctttaaaacctggcctcctgttcccttcccccgggggtcttcttgccgctttctggtgcccctagtgggggcgacacacaccctgggtgtaagccagggactccacggccccccgcggcttctgtccttgtttatggtaaaagtagggaactctgcttatgcacatcaacggaatcattattatacgcagaggccttggactggggcattttgtaccccattggctcacctttcgttttaccagagaaggctttcttactgagttttggtcacactccttccccgcccgttgcccctcgttgtgcctgaagattcgctcttgaacgcctgaggaagaaagtggtctgccttacgaccaaaagcctgtggcaaattttgagtgctttccatcagggccgttgcctggtgtgcatgcactcacccctaaagtccctccctttatccacctttctctctggggcaaaagtcctccccgaggcccatacaccacggtagtacacagaatcttaccacaatcactccgggtacttgcgcgcacttggcagagtggagcaagggacttgcgctggacagacaaggcagcatctcttatagagtgggaggggcctgcctcactcatccgcctctccccatccaaggacctcttcaggaagcactggcaaacaccgtggtggctgttgtagcagagggcatggggttggcacaacccgccaccgtttgtctcgggcacgtgggggcaatctggagcactcctggatcaccacaaaggcccaggtggtgccaaccctctcgtatcccagaaagggcagcatgatgttttgtagggacagtcccccatggccgcagagaggtgccgggtccacccccaaggcaacaaccacaggaagccagagcaaaggtgcctgctgtgtcagaggaccccaccaatcttctcaaagccatgaggcacaaggcatgagggcagcgaggtcatgccaaattccctgccccatgcctcccaacacactacccacgagcggggaggacagacgaggggccccgcgagcagaatgagaagaacggttccattcaccatgaatttccatcctttgctcctcgtggcttagtcccgacctgggagagcgtgacatcacattgatcatgaaaagccccatagcggggcggtggttgagtgagggtctttcttgacgaagctgatgatcataacagcccagccagcctcgctccgggatagggacagcagacaatttaaggaagagaatggctgacgtgcacagcacaaagccaacaggatggggttgttctgaccaccccgtgtgcccgcagcagggagcacacgggtcagaggagcccatgctgccttccccaccagggtcaaaggcccagagacagttatgacactacgatgcatgagagcaggcacacaggtcccagcaatcagctcaagctggggcagggccggttagccgggttactgctataccagagcttcacatgcatctagaggcccaatctaatcgccagacagcatgtcagcaacaatctggtggcccaaaatgccaactcggagtgaaagatatacctcgcctgggggcggggtgtcaagtcaccgaccacaccaccggcccagaaatgcgcgacctggacatctgtcctcaaaaaggccaccatggcagccagatatggaacacccaggccttctgtggaccccgggacacacacaggagcagcagagggtcagggacaccctcccggccacccgtgcaatgcaggggctggcccatttctccagagcgagactcggagtcattttcagccggtccctcgcatgactggatcacatgagggacccaagcccggccagctgccacctttcggaccacatgcgtgctcagggaccgctctccaactcggcatggggacttggaaaaaaagatcagggcagagggactggggccgggcccggtgaccgctcctcggcaaccaaaggacagtaaaggacggtccctgactcccccggggacttggaaaataattcggcaggtgcctcagatgtccaggacctgtactggcctgccaccaggctgggaagttcgtccccagccacccgcaaaatgcccaatacgtccccgcgggtcttgggtcaagccttgggagttgggggcgtgctgtttgaccagccagggcagccccacactgccattgagcagggaagcgcggcgacagcctccccccacaagccctgcacgcccgagctctgactcacaagtgacgcgccagagctccagatggcagggcagcccatgactgggaaaccaaaaccatgagtggaagtcttttgaaggcccaaaacgcagcacctcctccccaacttcacagaaaccgttccccaacgtgtctctgcataggctgcaacagagtcaaaagacaacttgggagtttgaagatgcatctcagaaggagaaagaagaaacgggacttggtcgcggatcggttaggacacagggagatacagaatgaggagagtcttctagaatccagacaaagacagacagaggaagggagggagaaaggaaatggagaaaagagacagacagaggaagggaaggagggagggaaaggagcagcgagggaggaagtgaggaaggaaatgagaaacagagagagacagaattttaaaaatctagagaaagaagtataaagaaagagagaaagagacatagaaagggaagaaagatgaaagagataaagaataaggaaagaaatagaggaaagccaggaggaaaaaacaaaggaaagaaaaaagaaagaagaaaaaagaaaaagaataaaaggcagaaagaagaaaggaaagaaaggaaaggaaggaagaagaaaggaaggaaggaaggaaggaaggaaggaagaaagaaagaaagaaagaaagaaagaaaagaggagaaaataacaaagaggacagggcatggtgactcacatctataatcccaacactttgcaaggttagttgggagaatcacctgagcccaggagtttgagaccagctctggcaacatagcgagaccttgtctcacttaaagaaaaaaaaaaagaaaaaaaaagttagccgggcacgatggcatgcgtctgtagtcacagctcctcgaaaggctgagataagaccatctcttggactcggaaggtcaaggctgtggtgagccagggtcaggccaatgcactgcagcccgggtgacagagcgagacttcgtctgaaaaaacttgaacgaataaagattgcgagtcctgcaagaaaaagatataaaggaaatgaagaaggaggtcgcgttctgaaaggaaaaatattttaaaaagaaacaatgggcggatgcggtggctcttggctgtaatcccagcaatgtgggaggtcaagtattcaagaccagcctggccaatatggtgaaaccccatctctactaaaattacaaaaattagccgggcgtggtggcgcgcgcctgtagtcccagctacctggggtgtgtgtgaggcagaagaatcgcttgaacccgggaggcggaggttgccgtgagttgagatggcgccactgcactccagcctgggtgacagagcgagactctgtctcaaaaaaaatcaaaaaagaaagaaaaagaaaaaaagaggaagagagaaatatggaaagagagaaagaagaaagaaaggaaaaaggaaggaagaaaaagaaaggaaaaaggaaatagaaaaagaaaaaagaaagagaaagaaagagggaactggagaaattaagaagacagaaatgaaaggagaaagatgaaaaaaaaaacctctaaaaaaatagtaaggcccagggcggggctatgatgcactttccactttaccaatatgctggccagggaaagaaaaatgttaaacataacgtaacggtaaaaagtgactatggcggcttagccagggtggttgagtttccctagggagggagggagagaggaagaggaaactgtcagcgtcgaaggagagaaaccgaggtgagggggaggggacaaaataggagggggaagggatggaggcacagtagttcactctggaatgttttctagcctggggtggatggggagacacggagggcaactcaggaaacaagctgactccagaaatgacaccgaattcatagtgctgccatcgctgccttgaaaggtgtgcactgcataataacctccttcggtcgtttagtcccacaggcttgacatctacctgctttcacaatatctggggagaatcagaaaagtccctactaacgaaaaggcctagggtggagctgccatctgtaaaacccaggcagaagagtccacgcgggttaaacacacaaataaagaaaaggaaacaactgatcaaaagagcaacaatctggcccaaccagaatctccagaggttttctgggcaatgaaggagtgggaaacagagggacggaggtagagcgggcctcagagagcggggtgggggcggggggagcggagagaagccacgctccttccgtaccgtgggcgggcggccagagcgtcctgtgcgccgcctagacttcaaaaacgttgaccgctagatgacgaccgatgacaacgcatggaagtgtcagcccggcaccctcccaggagctcccaacaactaatcgaccagagcccctgcgggggaagaagcaccgtggctcgggaaaacatggagaaacatgcgcctaagcatgtacacacgtgcacgccatatcccacaatatagacgagtttataccgtgatagtgagagaatccatttctagtaacaaaagcagcaggctgggcgcggcggcccacgcccgtcaccccagcaatctgggaggccaaggcgggcagaccacctgaggtcaagagttccaaaccagcctggtcaacacagcgaaatcccgtctctaagaaaaatgcaaaaattagccggggtggtggtgggttcctttaatcccaactcctggggcgcgagaatcacttgaactcgggaggtggaggttgcagtgagctgagatctaaccaccacactccagcctgggcaacagaggaagactccgtctcaaaaaaaaaaaaaaaaaaaaaagagtcaatcgcttccatctttagacgaatacactcttacgcttagacagatagcttggaaggtacataagctttataaacatttgtaattttgagtcagtctggcgatatttccaggccttctccctgtaagtggtcacagaaataaaaactccctcctttttcagctcatctgcatctcgttatcaggccgcgagaataagcagcctgaccctcagtttggtccgggaacaattaaactccagcccgggtgacagagggatattttgcctcagaaaagaaacaagaaaacaataaaaaaaaaatgaagatattagccgggcgttgtgctgtgttgtggctcgcgcccgcgcctgtaggcccagctactcgggaggctgaggcagaggaagatcgctttaagcccagcagttcaaggtcacagtgagctatgatcctaccactgcactccagcctcggtgacacaggaagactccgtctctaaaaaatacatgaatgaatgaatagatgaatgtaaaaaaaaaaaaatgcaaggaggtggcagagcacgggaaggctccactcgttcctaaagaccagagcagaaaaacaggaccatccgtttgagatatatgctattccgaatcacagtggaggccttgaggatttcggagcaaggccctgccattatctgcagataaccattcttctttggagccacaggctatctcagctagcctctggcagttggtagaaaccaaacgcccaaccgtggggccacgaagttatcgtgtgagctcagccactcatcacacactgggcgtaagtgggtgtgcacagcagcactccggggtgacacgcaagggctgtggaccggattgggtccaaacagatcctgaagcgcaagtaagttccacgagaaagtggcccaaatgcccatggtacccagtcaagaaatgagctaagaaattacacatagctgggcacagtggctcatgcctgtaacctcagcagtttgtgttggggaaagcagccccacaccatccggcgggtaccccgagtccagtggacacaaaggagttagaaagagacaaaataagtgtttaaaaggcgggtccaggggaccggagcgtcggaggcttgctccaggcccagagctctcgggctccggcggaattcaatggtttacaagctctttgttcttagggcagatgggaggggtagaaagggatgaggaaaaggattaatcaccgaaggagaactcgtgagtccttcaataagatgtatagcagtggcggtttttgtgaatttccttgagcaaaggcgtgtgtctaaactacttaagatctttaacttatcgggactgaaatgggagggagtgggtttcaggaggagccaagatgtttgatgatactccactgtttcaagggagtgttatctcccttagcaacctgtggaatgcctctgagctgttatgctctcggggcataaagacatgaaggcaataaggagagttttcttctcagaggctgcccatggctccccatgggtgtctcacaggggagaccaactcatctggcaccccagaaactctctttcccacactttgggagggtgagatgggtggatcacttgaggtcaggagtttgagaccagcctggcaaccacggcaaaaccctgtctctactaaaaatataaaaattagtcaggtgcagtggcgcgtgccaatattcccagctactagggaggctaaggcaggaaaattgcttgaacctgggaggtggaggttgcagtgagctgcgagcatgccgctgtgctccaggctgggtgacacagtgagactctgtctccaaacaaaaatttaatttaatttaaaaaaagaaagtacacatagaaattacacatagccaagtgcagtggctcacgcctgtaatctcagcactttgggaggctgagacaggtggatcactttgtagcatcattgctgcctcgaaaggacagaggcgtgtgtttatgtcactattggttttatttttttcttttttcctggaaactcattttttattattattattagtagtagtagtagtagtagtagtagtagtattttggatacggagtttcactcttcttgcccaggctggagagtaatggtgcaatctcggctcaccgcaacctctgtctcacggattcaaggattacaagcaagtgctgccatgcccagctaacttggtatttttagtacagatagggtttctccatgttggtcaggctggtctcgaactcccaacctcaggtgattcccccgcatcagcctctgtaagtgccaggattacatgcatgagccaacgcgcctggcctctttggttttgttttgttttgtttttgagacggagtctcactctgtcacccaggctggagtgcagtggtgctatctcagctcacggcaaccttcacctcccgggttcaagcaattctcctgcctcaacctcctgagtagctgagattacaggcgcgcctggctaattttttgtatttttagtagagggaggttttcaccatactggccaggctggacttggactcctgacctcatgatctgcccgcctctgcctcccaaagtgctgggattacaggtgtgagccaccacacctggcatatttatttctttttcaactgatcaaagaacagtcagacccagtcatcagggtggcaattccctaggcaataagggagggagaaacttggaggtgggggcaggggcagtggagaagacgcagttgccccgggctgcatgcaggcaccacaagctttcttcctccttgaggccttggttttcagagtaacagtggcctctaggtgatgcccaacgtctgccaattagagtgtcagcctggaatgaattgggatcacccggaggggagaggggaggggaagaatggaggcacccacagtacagtgggtcaccgcgccctcccaggcagtccccacaactaatcaaccggggcccctggagggacacagcctaagtccccacccatcggatcatctagaaattccgtccagagaccgattggaaattcagtcaagctccaaacctaaaagaatcactggcacacccaccaggactaagacaacttttaaaagaatcgtttctgtgttttgggtgcatccgtgtatttctgtacaacaaagttatttattttaaatgttacaagttttttactccttttctttttaacttcttacgtgtacagtaagaaggggactcgtcagctcagagtccatgaagccagaagctgacatcctcagttcctatttagaatgaatttaaacaagccatccaaacactctgccatgaaactcctggaaagacaagtgattaaaaaaaagaaaaaaaaaacaatgctgtcaggagcagtggctcacgtctttcatccctgcacttcgggagcctgaggacgggtggattccttgatcccaggcaatcgagaccagccttggcaacatggtgaaaccttgtctctacaaaaatacaaaattcagctggtttcataatctggactcaaaattaataaataaatagattgaaatttaaaatttaaaaaaaatcttaaatgctgtattctgttatttttgcttcctaccctgagaaggaagtaatatagctgttgtctgtctgtccatctgtttgtgatagggtctcactctgtctgtcgcccaggctggagtgcagtgacaccatcacggctcacggcagcctcaaccaccccagggttaggtgattctcccacttcagcctcctgagtagctgagaccacaggcatgcacctcgggttttggcgtgttgtccaaggctggtctccagctcccgggctcaaaagatcctaccgcctcggcctcccaaagtgttggggttacaggcctgagccaccgaacccggcctgacttaatacatctgttctcactgtgtcctgaccacatgcccttaaagaactcgagtcgagagagtcagcaagagactttcagcattgtctcccgaaagcagtgaggtggatggcggtggagtgtcccaaaagcagtgaggtggatggcggtggagtgtcccgaaagcagagaggtggatggcggtggattgtcccgcgctcctgtggttttaggtggccacgcatggaggatagatttcaaatatttccggagaggctcgagccacagtcattcagagcatccgagctcgggatggggtttctgacagcgccttaagggcaaggaagggccaggaagggcaggatctgccaaggcccgtcttccagggtggggacaagggaacccaaggtagagggagccatcgatctgcactcagctccagccctaggccccaccgtgcagactaagtcagaaggaaaagtccctcgtcctacatgccacatccctccactgaacttgggagcagatctgtttttcaaacatgaggtgaccagagttatctgttctactttagaaatcccaagttgaccgtcaagtccaacgctcgctgcagacatctagtggacccggcgctcgcggacggaagcggacagacctagttggatccttatcccaccaatctggcccacctttgctgccatctaactccgctgaccggcccaccgttcctccactgttcgctggttgacccgggcagcggagagaggaggtaaggcacaagggcagtgactggctcatgtcccattcccgcgcacctggggtggggagaggggcccaacggccaccaccgggcatgcgtgaacactaccgggacaggaaccgcaggggcacaccctccaacacccaagcgtcagccattctcaacaggctccatcccagcccctggaggagttcccagcgggttgcggggaggaggtggaatcggtgaggtggaacgacgagcaggggcgccaaccctacatcggcaaccccccgcgcggcaccttggaaagaccgcgagtggggacgggcgcctcccgaatgcacagcgggcgccgatgggctttcgcaagagacacccgctgcgtgctccggggctccggggcgggtgggcataagcgggccagggaaggaggtccccgggggcaacaggagggaggaaggaaggtagacctcatgggctgaattacacaggacacgccatatcaccaggtcccccgcacacgggtggagagaaccttgtgtggaggtctgactttcagcagatcgcagcgagggagctgctctgctccatagaaaatcctgacccagaagcagggcgtctaccaatagtttagcatcaggttccccacaaacacgttacctgatgggtcagggagtgaccacctttctggcagcagcccgtttcccaggacgaggggctgtctgcaccggacgccggttcccggtgcacagcgggacatgccccgcgcggggcggagtggcccgccagctgggaccgcagaggaccgcctttccgaggccaaaaaacgctccgcggcgctgccaaatcgttcctcctcggcgggattctgacttagagtcgttcagtcataatcccacatatggtagctttaccccattggctcctcagccaaggacatacaccaaatgtctgaacctggggttcctctcctactgagcaggattaccatggcagcaacgcatgggcagcaacacatggggaacacacacagtaaaactaacacgtctcacatgagtctaaccataatgctttccaaggcatgcacaccgctcgcgggtgaatccattccagtttgccttgccctttgcaaagaaaagagaactctccaggtgcggtggctggtgcctgtaatcccaacaatttgggaggctgaggagggcggatcacctgagatcaggagttcaagatcagcttggccaacatagtgaaaccctttctctacaaaaatacaaaaattagccgggcatgatggtgggtgcctgtaatcccagctacccaggttgctgaggtgggagaatcgcttgaacctgggaggcggaggttgcagtgggccgagatggcgccattgcactccagcctaggcaacaagagcgaaaatacgtctcaaaaaaataaataaaataaaaaagatacaaataattagatgggctctattgcccaggctggagtgcagtggcttgatttctgcgacaacctccacctcccgggttcaagtgattctcctgcctctgcctcccaagtagctgggactacaggcgtgcatgccaccacacccggctaatttttgtatttttagtagaaacggggtttcaccacgttgaccaggctggtcttgaactcctgacctcaagcaatctgcttgccttagcctcccaaagtgctgggattacaggagtgagccactgcacccggcctatgtgtttgctttttaagtctctctttctagggtcatgagaattcttattaatttcacttagagctccttgagagaaaagcctctattattgtcattgtaacagtaaaaaaaaagtagagcttttttttttttttcttttgggacagagtttcgctcttattgcccagactggagtgcaatggccggatctcagctcactgcaacctctgcctcccaggttcaagcgattctcctgcctcggcctcccaagtagctgggattacaggcatgtgccaccacgcgtggctaattttgtgtttttagtagagacaggatttcaccatgttggtcagtctgttctggaactcctgacctcaggtgatccacctgccttggcatcccaaagtgctgggatcatgggcgtgagccaccacacgtggctcccaagaactcttcaaatgcacctagtgtcacaagaacagatagtaaaactgtatctgaaaaagtggcttatgctgggaaacttttggtggatttggggaaacttagggcaaattttaaacatgaggacttttgtcagatcacctacattccttggattctatgtgggtttgtcgcagatgcttgatgtgacaaattacacggtttctatcacttcatttgatcagcctcccattgactttcagccaagtcctgcagaattgcttctcagattgtatctttcctcaagacaaagatgtttttcatagtgtttctctaacttctcccttttgtggctattaatttatacttacatgtttttcaactccttatttttgttttctctttgtgaaagcttttaacctgtgctattcttgagggaaatactgatgcatatctaaactttaagggtgttttccaccctggctgcagacacttggtgagtaatttttcaggtgatgggaaaacccatcatcatgagaatgtagcaaatttcattttgcagtaactgttaaaattgtagccatggtgctcagtaaaagaggaccttccccctgtaggtgtttggggaggagtgaagtcctgtcctccattttgttagtaacctgcttgtggatggggtattgtcacccagaaaggaaagagatacgatggtatgcagttacagggagccggggaaagagcaagacaaaaaaattccctcatgtcttcaatgcagagccggcatttagacctctactccaggcagggcccacaaatctctggcagccgtgagcacctgttttgcttttgccttcttcctgttggcaattttggtttttgggttttttttttgttaagacagagtctcactccatcaccgggctggagtgcagtggtgcgatctcggctcactgcagcctctgcctcccaggttcaagtgatcctcttgtctcagcctcccaattagctgggactacaggtgcgcatcaccacggacagctaatttttgtatttttagtagagatggggtttcgctacactgcccaggctgatctcgactcctgatctcaagtgatctgcccacctcagcctttcaaagtgctgggattacaggtgtgagtcatcgtgccctgcctgttgacaatttgaggggcatgtaaaatgtctgcaggcttttcagccagaaaaacacagaagactgtgttatgtggcttctccattctccctctttctctgctctcctaaatattaaagggttctccttttcccaagcccagtggaaaagcctcaggaagcatggcggtatcagaaacatccaaagggatcccatcaagtaattccaaatcactctcattcaccccattggaagtttctgccatcctgtctgccctggaggcttcctaatgcaggcagataatatccttggtgtgctattaggctggaagactccctcatctttgctcttctgtttgagaaaaaaaaatgcccgggcacagtggctcacgcctgtaatcccaacacttggggaggctgaggcaggcggatcacttgaggtcaggagtttgagaccagcccggccaacatggtgaaaccccatctctactaaaaatacgaaggttagccaggcgtggtggcggacgcctgtaatcccagcgactcaagaggctgaggcagaagaatcactcgaacccaggaggcggaggttgccgtgagccgagtgcaccactgcactccagcctaggcaacagagcaagactctgcctaaaaatatataaatataaatataatatataaatatacttatatatattatatataattatatataatatataaatatattatatataattatatataatttataaatatattatatatataaatatataatatatttttatatattatataattatatataatatataaatatattatatatataaatatataatatatttttatataatatataattataaatatataatatatttttatatattatatataattataaattattatatataatcaattaataatatatcattaataataatatatcatatataataatataattaataatataattaaaaatataatatataattataaatatagtatataattataattatatttttatgtattttttaataattcgttttaataaatgaatagaattcatcacctaacttctaaagctacttctcccgatgaaagtccgggcacttaggagtcaacagtggtgtattgagtgtatgactcttgctcacaggtgcttctcttctgtcccacggcaggcggcaccaacagaaggcttctgcaaagctgagagctccttttacccatggatcaggagcagagtttgcagctacactgtcaggctgtgtttggatgttagcagttagtttagctttgcgtcttcagagcaattgttcttagctacttaaaaaaagaaaagaaaagaaaggaaaatttaaaattttcttcattgatcattcaggagcatgtttaatttccatgtatttgtacaatttcaaaagttcaccttgttgttgacttctagttttattccattgtggtcaggaaagatactcgatataatttcaattattttaaatttgttgagacttgttttgtggcctaacatatggtctattctggagaatgtttcttgtgctgatgaaagaatgtgttttttgcatctgttggatgaaatgttctgtaaatgtctctttgttagtctaaaatgcagttttttgttttttgtttttttaggagagtctcactctgttgcccaggctggagtgcagtagcatgatcttgactcactgcaacctccacctcccaggttcaagcaattctcatgcctcagcctcccaagtagctggaattacagatgcccaccaccacacccagccaatttttgtatttttagtagagacagtgttttaccatgctggccaggctggtctcaaactcctggcctcaagggatccgcctgccttggcctcccaaggtgctggtactataggtgtgagccaccgcatccagcctaaagtacagtataaatctaatgttttgtttttgatcttctatctagacaatctgttcagtgctgagaatggggtattgaattccccagctattgtattggcatctatatctccctttagacctaataatatttggtttatattatatatctcggtgctccagtgttgggtgcatatatatttagaattgttacatccttttgctgaattgatccctttatcaatatataataaccttcatctttttttaatcacttttgagttaaagtctgttttatctgatatgagtacagctaccctgcttgcttttggtttctgtttgcatggaatatctttttccaccctttcagtctatgtgtgtctttacagatgaagtgagtttcttgtaggcaacctatagttgggccatgttttttaatccattcagccagtctatatattttaaggggggaaatttaatcagtttacattcaagattgttactgataggtgagggcttctgtcattttgttaattattttctgttttttaaatatatcctttgttcctttcttcccctcttattgttcatccttgtaatttggtggttttctgtagtggtaaaatttcttttctctttctcctttgtgtatgtgctgtaccagtgagttttatacttttttcgtgctttcttgatagtaactatcatttcacttccagatgtgggactctgttgagcatttcttgtaaggctggtctagtggtgatgaattctgtcagtttttgcttgtctcagacatgtcaggcatttagcttcaggacctgattctagttcctgccctgtggtgacaaatagaaacagatccctggtaccctgcttaggtactaagccagctagatgagagcagatgaaaaaatcaaatctttctattttgccagggattaattcattcccaggattgtaaatattacatttcacttttcatctcacagaactgtgaggttagaaagtgagctgggcagcctgcccagaaagacattatgatgtatacaacacagtgaactactaaggaggtgtctttaaaggcatttacagcacatagcttttagttttccttttaattttgctgctctttatttgtagtagtagataaggaattaagaaagcaaaaataagtgctttgactaggtcttttgcctttgaaaatagcattagtaaaatcctctcttcttttttattcttgtaaacttcacctaattcactctgccccccagcccatctgtgttcacttgctgttcttgctgctgtcagtttttaaaagcttactctaaaattacatgaaagcaaccccattttgacaaaattagaattctggtagcgatggcttaccatgaggctgttgagagaggcccaggaagacttttgttctttttatttcaacccctctcggttaaacctacaatttggtaggtgatataattacctcccttggacaggtctgtatctctgccttggagaaataacaaagtccaaagtactctcctcattcaaagatgttgcaaatgaaagctgttttgatcttcatgtattagcatttgagttttaatctttctggggctcctggcagaaaatttctttaaatttattatataattctaaaatattggacatatttgtttcacgcatctgtcaatatccttattcttttcattaaactctccactgcccccattagtcatcaggtcctactgatttttaactcctaagtatttctcaaatctgtctcctcagtgtgtattgttggttatataactccatctccattgtcactgtgctgctttagagtatcttttcttgtctagatcagtgcctggcttatattatgagcttcgaaaagttggatcaatgaatgaatgattcataatctggacaagtgcactctaacacttgactgaaaaacaaaatcttagatctatcttccatgtaaaagcatctatctaaaatgcaaatcttactttgataatctccagcttaatagcttagatggctcccaggcatccccaaaaccatctctcaattcactgatcaaaaaaataaaacttaaaaattttaaaactaaaaaaaattgaacatttcattggtcaaaaaacaaacaaaaaaaagatctctgagcatgcctcagtcacaccctgccctgctgtgcacccctctccaaaccccagcctacagggaccacccaataacctcttctttgctacataacccttaccctccttcctcaagactcatatattctccttagaaacttgccccccacttcctggaaacagtagattcttttttgcttatggtttttgtaatgacatcagccatttagaactcatgatgtgcccaggccccactatctgcctttccacagatcttgctcagacaatccatcaggatttagtcacagatccaaagtaaggagccagaggggagcttcaggcttggtctctttgggttgaagctagaaaactaatctatgctgaacacaaaaaagaagctgagtaatagccaacctacacatcctaggaataactattgttttttttgcccccagccagtctctccgcagtcctctctccttctttacatttcttttaaacacagtatgttaacacaacactgtgtaagaactgggattcagaaaaccaagatataggtctccaccagctatgctattgtgtccagaattgatgggttcttggtctcactgacttcaagaatgaagcggtggacactctcagtgagtgttacagttcttaaggtggggcatctggagttgtttgttcctcccatctggagttgttcattcctcctggtgggttcatggtctcgctggcctcaggagagaagctgcagaccttcgcggtgagtgttacagctcatagagacggtgtggacccaaagagtgagcagcagcaagatttattgcaaagaccgaaagaacaaagcttccacggtgtggaaggggaccccagcgggttgccactgctggctcgggcagcctgcttttattctcttatccggccccacccacatgctgctgattggtccattttacaaagggccaattggtctgttttacggagagctgattggtccattttgacacggtgctgactggtgcatttacaatccctgagctagacacaaaattctccacttccccactagattagctagatacagagtgttgattggtgtatttacaaaccctgagctagacacagagtgctgattggtgcatttacaaaccttgagctggatacagagtgccaattggtgcattcacaatcccttagctagacataaagattctccaagtccccaccagattaactagatacagaatgccaattggtgaattcacactgagctagacacagggtgctgattggtgtatttacaaaccttgagctagatacagagtgctgattggtgtatttacaatcccttagctagacataaaggttccccaagtccccactagactcaggagcccagctggcttcacccagtggatctcgcacaggggccacaggtggagctgcctgccagtcccttgccatgcacccgcccgcactcctcagcccttgggctgttgacgggaccaggtgccatggagcagggggtggcactcgttggggaggctcaggccacacaggagcccatggcgcagtgggggagactcaggcatggcaggctgcaggtcccaagccccgccccacagggaggcagctaaggtccggggagaaattgagcacagcaccagtgggccggcattgctgggggacccggtgcaccctccacagctgctggcccttgtgctaagcatatcactgcccggggccagccaggccagcggctgctctgagtgtggggcctgcctagcccacacccccctggaactctcactggcccacaagtgccttgcacagccctggttcccgcccgtgcctctccctccacacctctccgcaagctgagggagccagtgccatcctcggccagccaagaaaggggctcccacagtgcagcagcaggctgaagcgctcctcaagcgtggccagagtaggcgccgaggctgaggaggcaccgagagtgagccagggctgcgagggctgccagcacactgtcacctttcactatgagttagccatgaaaactctctgggcctcattgactaaatctgtaaaatctgactttatgaggattatattcattgaactctgaggtcctgtccatttcttacaccctgattcaaagactgcatataacctctaacccagatgttcttaactaggcttcttgtatgtctgggaagatgatgaaagaacttcaaggggatcatgagctctttaacttctatgtaaaatccaaggctgggcatggtggctcacgcctgtaatcccagcactttgggaggccatgacaggtggattacctgagctcaggagttcaagaccagcctgggcaacgtggtgaaaccccatctctattaaaatacaaaataatcagccaagtgtggtggcgcgtgcctgtagtcccagctactcaggaggttgagacatgagaattgcttgaatcctggaggcagaggaagttgcagtgagctgagattgtgccactgccctccagcctgggagacaaggagaaactctgtctgaataaataaataaataaataaataaataaataaattaattaattaatttaattctgtgtaaaatcctgtgtgagctggctgcatcaccttgccccacagagggggttttcttatctttttttctctcttccaaggtaatgatagtctatggttgccctactatgtactctctttttattattttatttattattttatttttttagagacagggtctcactctgttatccagactggagtgcagtggcatgattatagctcactgcagccttggtctcctgggttcaagcagtcatcgcacctcagcctcctgagtagctaggatcacaggcacaccccaccatgcccagctaattaaaaaaatattttttttttaggctgggcacggtggttcacgccttgaatcccagaactttgagagaccaatgcaggaggattgattgagtccaggagttcaagaacctgagaaatacagagaccccatttctaccatgaaaaaaataaaaacattagctgggcccagtggcattcacctgtattgccagccacttgtgaggctgaggcagaggattgcttgaacccaggagtgcaaggctgcattgagctataattgtgccactgcactcagcctgggtgacacggcaagaccctgtcttaaaaaaaaaaaaaaaaaaaaaagaaagaaagaaagaaaaagactacaggtaagaaagtacttggataacagtaaaaaagttaaacacatgacattggaccttatgaaatgtgtttaccctagagctgtttattgtatgataggtccctcctagatagtattcaaggtttaatgcagaaacagagcaagactctgtttcaaaaataaaataaaataaaatagctggccatggtggcttgcacctatagtaccagctgctcaggaggctgaggcaggaggatctcttgagcccagagagttaggggctacagtgagctatgatcacgccactgcactccagcctgggtgacagagcaagaccctgtctctaaaaaaataaataaaagtaaataaaaaggaaccctgggctccacattagagattcaaattcatttgctttagcacggggtcatggaatctgtcccagcatcctaaaagctgcctcagtgagttaacaaaagggctggtattgaaagaactgtcaacaagctgtgacaaaaagaagcctcctctgtgaggcagggaagtggggccaaacaacagggggtttttttgtttgttttttgctttttttttttttttgtggaggaggagaggagctgatttaggacagctaaaatggttgtgagagagtacaagaatctagggaagtttgagaccgtgaaactgtggcagcctcagcaggtgcttctgtgggctttctccagctctcagcagggtggagtcaggagcagagaaggcagttggtgggatgacccgaagttggggtttcatcagagaggaggagcaggaggacagggtgtaaggcagatcaaggagtgttactaaggggctcaggtcctagacagtgggcctagcaggtaggcagtgagggtcgtgaaggatggggtagatgcatgacaagaggccctgaaaaccaggggaatttggcaacaacagagccctggcagtcccaggaggggagcaggtctaacaggaacacccttgcacctgtgcaggagagcagcaaggctaggaggctgcagacagacagtggataactgaaaggtgaactttctgctggacagcagatccctggatgccatcccgatggagatctaagatgaaaaatactccgccatgaaaatgccttacatggtcctaaccatgaagcataaaattgccttttcacctgaaaatgacctgcagcttcatttaccattttatgttttggatgtcatgtaacatccagaagcaataccctcctccattgcaagtcaaagtaaaatcagaaaatgctcagtggaaaggaaaaaaacaaaacaaaacaaaaaaacaaaaacaagcaaacgaacaaaaaaaccagaaggcaaaaaaccagcaatagaataaagctgcaaacccaaagcaccaggagaggaaagggaaaaaaacctgcagcatacacaagctttgacattgtgtgatctgtgaaaatgtatagaaatgttaccttacccaaaaattcccaaggtgctttatttgcccaccactggaaggaagtagaaattcccacgcaggttgttacttttaattttcatcctctttatgttgtttcctaaaataacaacaggtattctagagatgatttaccaagatggcttaatgaggtgtcagatgagtactcattcccacaagcccctttacctcaggcctccttatacaaatttgactgactcttctgagcccgactagataaaaaaacagacataattggagcagctgggctggaagcacagctgggccatccccatggagacaagattctagcaccacgtgctcttccttccccagcgtttctcctcactcttgcttttcagagcagcagcccacccaaacctgggtcttcctcagatgatctccacatcagtgcttatcagcattcatgtgcacacagatcacctgtgcaacttgtgaaaatgcagattcagacttaatggctggggtggtgcctctggatctatgtgtctaacaagccccatggtggtgcacgtggtcatcagatggtcctagttccacactcggacgagatatttagagcctgtaaaatagctactcccctatccagtgtttgagtcccagacttctggattatgctagcactcagatgcttctgggacaggacgcttcctgttcatcttgggtcaacacgtcagagagaccttcctgtattgagctgagatctgcctacgtagggctcaccttcacctggcctacttctgggccttggattctacgtagcaggcttaaggccttagaaagtggctggcatgtcccccaggtattttcttcaggcaaaacctgccaggtcctctggctattattttttaattttttttagagacagggtctcaccatgttgccatgctggtctcaaactcctgggcttaagtgatcctcctgcctcaggctcccaaaatactgaaattacaggcataagccaccataactggtcttggctattcttcttatgctatagtttggttattctggtcatttccttcttttttatttttatttttattttttttttagatggagtctcactcttgtcacccaggctggagcgcaatggcatgatctcaactcactgcaaccactgcctcccaggttcaagcaattcccctgcctcagcctcccaagtagctgggattgcaggtgcccaccaccatgcccagctaatttttgtatttttggtagagatggggattcaccatgttgaccaggctggtctcgaacttctgatttcaggcgatccacctgccttagcctcccaaagtgctgggattacaggcatgagccaccacacctgggcctagtcatttccttctggatcctgctctgtgtgtctttaggcctctcctcttgtgatatccatgctgcaaaaattagcttgggactgtcaccacctcattacagatagacttcatgtgactcgtgttgtacttgctgtcagccatcatccttaaagtcatttttacacatgctgtggatcagccacatttcttcctagtcagtaataattataattatacttaacacttatgagacttagtatagcaagatggttaagaacataggctctggaatgagactgcttagtgggaagcactatgattggcaccatgtgttatctatcaccatcaccatcatcatcatccatcaccatcactatcaccaccatcatcatcaacatcaccatcactatcaccaccatcatcaccatcaccatcactatcaccaccatcatcatcaccatcaccatcatcacatcaccatcaacactatcatcaccaccatcaccatcaccatcatcacatcaccatcaacactatcaccaccatcaccatcactgtcactaccattattaccatcaccatcattaccatcgctatcaccatcataccaccatcaccatcatcaccatcactatcaccaccatcaccaatcatcaccatcactatcaccaccatcaccaccatcaccataatcatcagcaccatcaccatcacccatcaccatcaccaccatcactatcaccaccatcatcttcaccaccaccatcatcataccatcaccattatcattgccaccaccaccatcatcagcatcaccatcacatcatcatcaccatgttaagtaagcactttgcctatgttaactgatttaattctcgtaacaacttcataatgtaggggcaattattatcccagttttacaagtgagaaagtgggacctcataagattatgttttgtgccgagggtaacagtgacaagaatctaaacctgggcagggtcctttggttggttttgtttgttatgttgttgaccaacgtgcaagaccatatctgctcctgctattcataaatttcatcttttagtcagcactttatccttattttacactatcttttggattcctggttctgtcatcccaagtgtatctgcctcctagcttcatgctgtctgtcatattgtgagaaaaatatgtatcttcacctagatcatgcacaaggtcagaggccatgcagcaattccctacagattctgctcactgaagcccgatggtgcacatctcctgaagctccctgagcctgtagtcttgtaacccactcagagaagcctagggagtggtcggacatgatttgtttttgaacatatttgtatttggttcctgagaatcacgtttcctcctcactttcaggtttccattccagaatcttttccaagatggacagctccctccaaatttatagttgctgaaatcaattctctgggcagggtcagatgcaaggaacaaatagaaaacagggcctgcagaacacacatcccagaggtgataatgaccggttaatccctgcagatagttagatctaggagactgtccctgagcttcagggctccctgcctctgaatccagcagtgcaaatgcaagcctctatgttccccctaaaccataggtggctgaggagccatggtgttgccagcatttctataaaggaggagcgcagggcagcaatctcatcagaagggaggctggggctggccttgaatttagattgtatgtatatttggggcaatttgcaaggaaggggtgccctgatagagattttgtgggctaaatcccccacataaagctattttgtgccactgctcctgtgccaactcaccagaaaagctggactgatttctcccctctctcctttcctggttctgttctctgaccctgggtgattaatgtaacctagctatgttcaattacccatccttttcatgatgtcgggatgtctgccacctgtccctggtgctcttcttggcttcctgtgagctgtgacaatgggagacttgtggcttttggaggagagcaggaggccctgggtctgccatcagtctggtctccctaatcacatgattatcactggagccttcccgagctgggaagttgcaaaacaaacatgcagggaacattcttccaccccagtacgttcccctcatgaaatcatcaagcaaaccctgcatgctttctcttggtgtggtcaggcagaaggggtgtctctctcatactagagcagtcaatggccattggctgactgagactaacagcagatctagaaggatttggagaatgctgtcttggttctcttagaacagcatgtggccctagtagtgtgcctgttttggggacagtggagcccctgcaagtcatgaaaactgatggggcagggaggggagctccagccagaaatgggaagtgtctcaaaccttagtgaagtgatcttgaatctgatttacagggctgattttgacacattattctcaagaaaacagtggtttaggtcatggtctcaagctctatctagattgaaattctgtcaggcatgttagctcacatttgtaatccaagcactttgggaggcaaaggtgggaggatcgcttgagctcagaagtttgagaccagtctgagcaacatagtgagataccatctctacaaaaaattcaaaaattagctgggcatggtggcacacacctgtaattccagctactgaggaggctgaggcagaaggatcacttgatcccaggaggttgaggttgtgatgagctgtgatcatgccacagcactccagcctgggcaacagagcaagaccctgcctcaaaaaaaaaaaaaaaacaatctttaccagctctgtgatctagcacaatttatttgagttttgcaggcctcatccaaagataataattggacttaccttatttgttgtgacaactaaataaaaaataatacatgaaaagtgcttagaacagttcctggcacttagtaagagctttgtaagtattaactaatattagtaccatcatcatctttattgccactatctactgagtatttaatatgtaccagacatgtctaagcacatatagtacatgcattattagctcattgaacttcacttcatttttttgggggggggggtagggcggggtttgttgttttttgtgacagaatctcactctgtcacccaggtggcagtgcagtggtgtgatctcggctcactgcaacctctgccccccaggtttaagcaattctcctgcttcagcatcccaagtagctgggactacaggcatgtgccaccacacccggctaatttttgtatttttagtagagacagggtttcaccatgttggccaggctggtcttgaactcctgacctcaagtgatatgcccaccttgaccttccaaagtgctgagattacaggcatgaaccactgtgccttgctgaactacactttgaagtaagggttaaccctgtgcttcagttgaggaaactaaaaatgggagagttcagtacaaagttaaaccagcaagtaattgaagtcgaaatctagaatcaagggttttttgtttattttttattttggagacagggccttgccatgtcgcccaggttggagcatggtggtgcaatcacagctcactttagcttcaacctcctgggctcaagcgatcctcccacctcagcctactgagtagctgggatcacaggcatgcaccaccacacctggctaatttttgtattttttgtagagacagggtttcattatgttgtcctggctggtcttgaactgctgggttcaagcaatccaccatccaccttggcctcccaaagtgctgggattacaggtgtgagccactgcatccagcctggaatcgagttttcctaactccggagttacactgttattgccctctgctactgtccgtagtaacagccatattactgagtacttcccactcgctgagtagggtgctgagcactttacatgccttatttcatttaatgttcacaataatcctatgaggtagattcttttgttattcccattttacagatgaggtaaccaaggatcagagaagctaagcagcctccacagatttatatggcaaagaaagtcagcatttaaatccaggccttcctgactctaaaatctgttctattgagtttgactgccaaacaggtgagcagaatgctcctaggaggttggtaacagtggttggtgatccataatgtctgggatccactgaaactccgggatacagtttgcctaatcagccctattttctgagctattgttagggacaattttcactttctctgatgcttcatttccctgcagcttctgaaagctgttgatttgctcagaataagaccatgttctgtgcctttcgcatctcagattgttgtgtacatgctcaagagtatagaggaatcataaacattccagaaggaggccctggtgtactatgcgaagtttttgccacatagctatgggaggaatctgtgtttcttgaccaaacacttgaggttatgggactgcaagattccaaatgtgcatttcaacaggtcgtgatggggcaacttgttttgtgacatatagcactataagtagaatacattctatagacaagggattcttagccaggcatgcatggtggggcttcagaggctctgggaacattctgtatgtgtgtgtgcattttactggagagagagctcctaacttttgtaatattctcaaaggagttcatgactcaaaaaaattatttacaaaccattgttctccggccaggcgcgttggctcatgcctgtaatcccagcactttgggaggccaagaagggccgttcacctgagaccagcctggccaaaatggtgaaaccctgtctctactaaaaatacaatcagctgggtgtggtggcgcatgcctgtaatcccagctactcggggggctgaggcaggagaatagctggaacccgggaggttgaggttgcagtgagcagagattgcgccattacactccagcttgggcagctgagcaagactccatctcaaaaaaagaaaaaaaaagaagggctcccatctgcttttgcagaatcagagaatgtgatcactgcaacggttgaggggagggcgcaggggaaggaagggggagggccaaaggctggagggacaatagctcaccctggaatattttcaagtttagtggggacgactctggaaacaagctgactctgaaaatgacacagaatttacagtgttattgcttctttgaaaggtgggcggtccgtggtttttcctcagcattcattcatatacttctaggaagtgccatttagtttcatacagtttacatatacctggttttgctgcatctggagagattcaggatagttcttgttaatgagaagtcatagggtgaagctataatgcactatccattgtgaaccctgataacttgagataggtctcagtgaatttagaaagtttatctggccaagattgaggacgcacacccgtgacacagcctcagtaagttctgaggacgtgtgcccaaggtcatcagagcagtttggttttatacattctaggaatacagaagacatcaatcaatgtgtacaagattaacattgggtcagtctgcaaaggcgggacaacttgaagcaaaggcgggaattctcaaagcaaggagggcacttctgggacataggtagttgagagacaaatggttgcattcttttgagtttctgattacccttcccaaaggaggaaattaaatatgcatttatctctgtgagcagaggagtgactttgaatagaatgggaggcaggatggccctaagcagttcccagcttgacttttccctttagcttagtgatttggagccccaagatttatttttcttttacacaatttttaaaacccaggtagaagtagccatgcttgttaaagaaacaaaggaagaaagaaaagcaaatgataggctgggcatggtgtctcacgcctgtaatctcagcaatttgggaggctgaggtgggtggatcaccagaggtcaggagtttgaaaacagcctggtcaatatggtgaaaccccatctcttttacaaacacaaaattaggcaggtgtggtggagggctcctgtaatcccagctactctggaggatgaggcaggagaatcactggaagccaggaggcagaggctgcagtgagccaagatcgcaccactgcactccagcctgggcaaaaaaagtgaacctctgtctaaataaataaagaggtaaataaataaatacaattattttaatctgcttgttaaaggtatctgatagaattttgaattttttttgttattttgaatttctttgtttctctaatacagctatttagaattctctttcagaaaaatgacacatttttgtttctccaggattggtccctggctccttttttagtttgtttgattaagtatttcttttaatgatttgttgatgccagtagatctttgtgggtgtctcaccattgaagattttaatatttattgtagtcaacactgcctgggtttgtttgtagccattgttcctaggaaggctttagagatattcaaaacgacttgggtgttgtgatctaagctctttctactttatgggacatctcaagcccagtaacactgtggttcttgcaggctcacagaggtactaccttgatggtcttggacaacatggtcttgcagaattttctgaattatctggcagggactcttcttcttttactttctcccaaacaaatggagtctgtgtgtgtgtttatctgtgtgtgtgtgttctgagacacatgaaagtgaagtggagtgacccaaacatctctgtggccatgaccactatgactgcactgggtcagacctgaatccagcagagtgcttgatctcacccaaggcctgccatcacagcttcctggttactgtgtgatacccaaccttgttttaacctgaattgactttcccttagctgagagagccagacagactccatcttggctccttcacttacagccccttacccacccccttcctcaaggacttaacttgtgcaagcagtctcccagcacatccaaggacgcaattaactaataagatactgtggcaagctatgtccgcagttcctaggaattcgcccagttgatagcacccagagcccctgtgtttgtgtccagttgataacacccaaagccctgcgtctatcaccttgtaatggatttaaagcccctgcacctggaactgtttgttttcctgtaaccatttatccttttaactttttgcctgctttacttctgtaagattgttttaactagactccccccacctcccctttctaaaccaaagtacataagaaaatctaacaccttctttggggccaagagaattttaagtactagccatctcttggtcaccggctaataaaggactcctgaattcatctcagcatgtggcgtttctctgtaactcactcggttacaacaactgtctatgttcattcagggcactgtggctctacaatcagcaggtgaaaaagtcagccaggcctcgattactcccttcagtttagcaagtttctttaggccctaggttggttcagaggtgctattcaggagtcagggactaaaataaaaaacttcagaaagctaaggttttggcagtgagagtttggcagaagagtgtggaatagatctttaaaaaagtgaaagtttctaaataaagattgaaacctgatgggaaaaacaatagagaaaaatacaaaaattattttcatgctaatgttacttatttatttatttatttttgagacaggatcttgctttatctccctggctggagtgcagtggcctgagcttagctcactgccagctctgcctcccgggttcaagtgattctcccaccacagcctccctagtagttggaaatacaggcacgtgccatgatgtccagctaattttttgtatttttagtagagatggggttttgccatgttggccaggctggtcttcaactcttggcctcaagtggtcagctcacctcggccggcctcccaaagtgctgggatgacaggcatgagccactgcgcccagcccagtttgttatttaattacaccagccctcattttgaaaaaagactagatgcagggattaacaactagtgctttgattttacttgtaaaatgtattttctttttttttcttgtgggcaccagtaaattaaacactaataaaaatataatacaggcctggcacggtggctcatgcttgtaatcccagcactttgagaggccaaggcagatggatcacaagatcatgagtttgagactagcctggccaacatagtgaaactccgtctccactaaaaatacaaaaaaaaaaaaaaaaaaaaaagccaggcatggtggtgggcgcctgtaatcccagctactcaggaggctgaggcaggagaactgcttcaacctgggaggtggaggtagcagtgagctgagatcgtgccactgcactccagcctgggtgacagtgtgagactccatctcaaaaaaaaaaaaaaaaaaaaaaaaaaaaaaaaaaaaatatatatatatatatatatatatatatatatatatatatatataaaaatacatgttttcagtcatgtagtgtatgtgtgtgtattatctttatatatgctatgtattatgtatatattatttataatatatagataaaatatacattatatatagaaacagacaaaatatacattacacactcacacacacactcattcacacacatgtgcaatgtggtctaaggtattgcagtgtggtaacatgtacacatttcacaagtttacatctttgagttattctggaagactgttatcacctctggcaaggaaggttcattaggaggttaatgggttctaatgtacatgaaacggttggctactgccttgtctgttacccagaggccctaagcaatcaggaagacagtaacaaaatttctgctcttggtaacgtttgcagtgcatttcataggtgtcattaatatcacaagctgagattgaaaagcttctggggatatatgaaaaattaatgggcattagaaaagtaaaatagcatgaggttgtgtgtgtgtgtgtgtgtgtgtgtgtgtgttaaagaatgcatgaagattgtgagcagatgcccaaggggtggagaagagagaaacagtatctctgtggattggagaaaggactgtggagggaagggctgcagtgtaaactgaagtaactgttttaatgaaaatctgtcagacagtagagctacaggcagcactgcttaaatccctagggaaaaagtagagtgtttgcgtttttgcgtagaacatgtatctaatatctgaagcaccttcacctacttccaggtgagcaccaacaatggccccaattcaccttcaagtggattattatcaaagtacatcattatgatactatcaggtcatggcaagtgttataaattgtgtacgcacaaaaattcatattttaaaactctaacccctagttcctcagaatgtgactatacttggagatagggcccttcagtgggtaatgaagtcaaaatgagactgctagagtgggccctaatctaatctgaatggtccccttaaaagaagaggaaatttagacatactgagacaccagggatgtgcatatacagaggaaagaccatgtgaggttacagcaatagggcagccatctgcaaggataaaagaagggcttcataagcatgttagtcattatcacactgctataaagaaatacccaagactggtaatttataaaggaaagaggtttaattgactcatatgaggaggcctcaggaaacttagaatcatggcagaaggggaagcaggcacctttttcacaagtggcaggagacagaagtgtgaagtgtgagcacaggaaaactgtcacttttaaaaccatcagattgtatgagactcactcactatcacaagaacagtatgggagaaacagcccccataatgcaatcacctctcaccaggttcctcccttgacacatgaggattacaattcaagatgagatttgggtggggacatagagccaaaccatgtcaatgagaaaccaagcctgctgacaccttgacttggacttctggcctccagaattgtgggaaaataaatttgtgctgcttaagccacctagtttgtggtattttgttatggcagctcaagcaaactaattcaacaggcaaacaaaggcacaaaggctgtgactgtggttggcagagtgtgttagaaacacacataaatccttggggtattcagacacaagtgagagagagctcaacactagaaattgctggactgaacaggggaattagagaatgctaagaacatttagattatgattttgaatgtgatcatttgtaaatcgagtaaacagataacacatactgaacttaggggattcattcaacataggagttaagaacagggacccagacatcttagttttgaattctggtcctgtgcattattctggacgtgttatttggcctctatctcttggcttcttcatctgcagagataatatggctagctgcatatggttttcataaggattaaataaattaatatgtataaagcatttaaactgttccaggaacacagtgatatacataagagttagctatcttcttattattgtcattatgaacaaacactgctcaaaatactttattaaaagcaattttcacaaaaattacttgggcaactgagatatggtgaggtaaattaacttactcaagatcacatcattaataggtaatggcaccagtatttgaccataggttatttattgtactccatagaagcaaagccattatttacaaaggactaaaaaaagatgccaagtagatgattaaataagtatatgtttactaggttcacattaatacaagtgacttctccaaatgaaaatttacaaataaaatagtgtgttcatttattttactactgaggtagaatggttctgttgaaaacagtgaattgaagtattcactaaacttgcctatttttcaaaaggcatttattcattattaataaataattaaggtaaacagtcaatgataagtattaaattgaggaagcagaaaaagtaaacagaaataaacaactttcagaatatatttggaatgtttaactgtatgcattttttattttctttatttttgattcttaaaattttttccaagaaatagaaatacttgaatctcaaattgaacagtgcattataaaagactgattgcattgtttcatttacaagtccattaattcacaagcaagtgcatttgatggaagaaggcatcttatgtgttctttggtgtacatgtgtttggattaagaaacacttcctctctgtctttaagtacaatattatacctgcaaagtggtggtctgagaaagagaaaaatggagagaacaaaaaaataactattagtaaaacaacagagttgatttccttctctcattaatattagaatagtccatgcctgtaactagctagttctctaaatgtagggagttggaacaaatatatgggatcatttccattctatctcatttggctgtgtagggatgaaatagacataatgcttataagaaagaaaaaaatctgtttcaacttcttttctcactgctttattggaaaacttaattgtattagagatacagttagatactgatacagttgaaacttgaactcaactcagtatccaggccattccttccatcatgatggtcaccagaagagagtcagggtgaatcacatagacaaagtttgccgaagcaatttaatcagtcctcttatgccacctactaaaatggaaataataaatcctaaagtattctatatcttggacagattttatatttaatatttcaagctttccaagaagccaagtcactgcagcactgttcacatatttataataaaatagtaagacaagtgtgttttcttttttctgcaatagactaaaagctcatgaccttagtagcatagcattgaattatcttctattagtgcatatatagtaaatacatatttttgcaaatatcctatattttacaaagcctctacaagcatcacaaaacagcttaggcaggttcacaatgcctatcaatgttaaattttaccaaagcctttgagaaaaattaatttgctgtccttttacattgtaaaagttcatctagttatcactgtcatgaattttgatatcttttttatcttatgtttaatagttccttctcccaggcaataaaaaataaaaacactataattttgtgatacattttgaattaccaagggaaaagaatattatgtatctatctttctaatttcaaaatgcatactgaatttgtacttctaatgctttgcttaccacacattaccaaaaatgaacacattacattgataaagtataagattgatctaaaataataaaaaagaaatatagtaataaaaattttttatgaattcaagtacaatccagttttctattttaatccatatatattataccaaagtacaaaaaatatataagcttctttacttgaaaaatctccctaaggcttttgctcaacctatcaccacatctgtccatttaatattctcttttttttgccattaatatagaggcccctaaatttgacttcatttttttatttatttgtttattttaaattcataaaattctatgtattcattatgtacatggtgttttgaagaataaatacattgtggaatggttaaatatagttaattaaaatacacattacctcatatagttattttgcaacaaaagcattcaacatctactctgcatttttcaggaatataatattttgttattaactgtggtcaccatgctgcacaataaatctcttgaactcattccttctatctaactgtaattttctatcctttgaccaacatctccttaacaccttcccctcccaactgcccagcctctggtaaccatggttctactctctgcttctatgagatcaacttttttagattccacatgtgagtgaaatcctacagtctttgtctttgtgtgcctggcttattatacttaacataatgtccttcaggttcattcatgctgttgccaatgatgggatttccttctttattatgtctgaatagtattccaatttatagatctctatctatctatcatctatctctctctatatataggtgatatatatatgcatactatatttttaatatatatagtatataccatatactatatatatataatatacatattatatttttcttacagcttcatccactattgaaatcttagttttattttttatcttggttatagtgactaatgctgtaattaacatggaagtgcagatatctcttcaacatactgatttcatttcctttgatatacacccagtagtgggattgctgaatcatatattagttctatttttaatgtttttaggaatttccaaactgtttttcctaacaacttttctaatttacattcttatcagtagttatcaaccattcccttttttccatgttctcaccaacatttgttataacttttgtctttatggtaatagccattctaacagtcatgaggtgatagctcattgtggttttaatttgcgtttccctcatggttagtgacattgaacacattttcatatacctgttggccacttgtatgtcttcttttgaaaaatgtgttttcagatcctttgcccaatttttaattaggttatttgttttcttgatattgagttgtttgagttccttatatatcttggagattcaccccttatcatatatatactttgcaaataatttctcccattctgtagattgtctcttacctctgttaattatttcctttgatgagcataagctttttagtttaatgtaatcccatttgtctatttttgcatttgttgcctgtgcttttgaggtcatatccaaaatatcattgtccagactgatgtcaagaagatgttccttatattttcttctagcaagtttatagtttcaagccttagattttagtctttagtccatttggagttgaattttttgtataaggtgtgacataaaggtctaattttattctttggcatgtgactatacagtttttccaacaccatttattttcattttgttttgtttttttaaaatagattcagggggtacatgtgcaggtttgttacaagaatatattgtgtagtgatgaagtttgggcttcctgtgtacccaatcacccgaatagtgaatgttgtactcaataggtaatttttcaattcgcatccctctcccacactaatctcttttagaatcctggtattgattatttccctctgtatttccatggttacccactccaacactatttattgaagagactgtcctttctccattgtgtgctcttggaacctttgttgaaaattaatttttaaatgggtgaatttattttatttctaggctctctgttctgttccattggtccatgtctctgtttttatgccagtattatactactttggttactatagctttctaatatattttgaagttatttggtgtgatgtctctagctttgttctttttgctcaaaattgctttagctatttaaagtattttgtggtttcatacaaattttaaggttttttttctatttcaatggagaatgtcattggtattttgatagagatttcattaaatctgtagatccctttggttgttatggacatttttaacaatattaacccctccaagctacaaacatgggatatctttcatttatttgtgtcttcttcaatttatttcatcaatgttttacagttttctgtgtaagaattgtttacctttttgattaaatttattcctaggtattttatcattttatagctattgtaaatacaattgtgttcttatttttcagatactttgctatattgcattttcaaagctatctttgagaatgttatattaatatttatacatattcatgcattttgtttttaaaaatggaatcatactcttataagacatcatgcttttctcaccaggcaatatattatgaatcttttcataaatataaataagcatttaaaatatattaaaaaagaaaaactactaattcttgtatattgattttgtttcctgcaatgtaacttattcctaatattcttttaaaatgttacttggataaggtttccagcaataacacagggaaaagaatagtgcctatttccacctgccatgtgagaaaacccaattcatagtccactcgataaggcacatagaagggtcttctctaagtagtgggaatcattacacctagactgagcacttatccaagctagcttaataaattttgaaagcaggacctgaaaggtttaaccccagtaacataacagtattttgagaatagaatttaagagcatttgtaggaatacaaaaatatagaacattcaataagataaaattcacagcatctgtgatctaattgagaattactaagcattgtgaagctggaaaatggacccatatgaggtgaaaaatcaaccaattgaaactaacccagaactagcacaaatgtgagactcagcagataaatgcattaaaacagttattatacctttatttcagatcttcaaaagtgaagtggagacatgagagatataaagaggtgagaactacgatgtttgagatgaataatacacttatgagattaaaagcagattagatattgcagaaaaaatcagtgaacttgataacatagcaacagaaactattcaaaataaaatgcaaagagaaaatagaattttaaaattaccaaagctatcatcacactgttgtactatcaaatattagatcttacttcaagtagccaaaaatacttaaaattggaatcctcagaggagaagtagtagaggaacacagaaaaaaaatctcaaaaaaatagctggaaatttagatgaaacttgatgaaaactataaacccactgtattagtctgttctcacactgctataaagaactgcccaagactgggtaatttataaaggaaagaggtgtaattgactcacagttcagcatggcttggaaggcctcaggaaacttaacaatcatggcagaaggcacatcttcacagggcagaaggagagagaatgagtgcccagcgaaggggaagccccttaaaaaactttcagatcttggccgggctcagtggctcacacctgtaatcccaacaccttgggaggccaaggcaggtggatcatgaggtcagcagattgagaccatcctggctaacatggtgaaaccctgtctctacaaaaaattagccaggcgtggtggcatgcacctgtagtcccagctacttgggagggtgaggcaggagaatcacttcaacccgggaggcagaggttgcagcaagccaagatcatgccactgcactccagcctgggcaacagggcaagactctgtctcaaaaaaaaaaaaaaaagttctgatctcatgggaactaactatcacaggaacaggatgggggaaccaccacaatgaatcaattattcaattatctccaccaggtccctctcatgacatgtggggattatgggaactacaatcagacccacccaaaatggctacaggcctgttttgaagattattgtaagactccagtggctctaacaaaacaagggaccatagaaaagacccacaaagtgcaggcccaggagaaagagcagcaaggaaaacaggaaaaacctgtcctacaggccctgccagaggagctagagactccacccccttatgttccaatttacccttctctggcaaggcttaggcaggaagccactccagcagctgcctctggagggtcggactcagaggagagtatccccgaaacttcaacatgtagggaagagccatgaccactgcccgataaatcaaagaggaactccaggataaggttggcggtctttggtcaggacatgcctgagtcatgcagattcccctcagagaaactagatttgggtggggacatcgccaaaccatgtcacccacaggtccaagaaagccaacaaacttcaaaatacaagaagtatgaagaaaattacagcatggtacatcataatcaaattgctcaaaatcagtgacaaagagaaaaatcttaaaaccagccaagaagaaaagtagattatctttggggcaacaaagaaaggatagcaacatatttctctttaggttcagtgcatggtagaagatggcaaaacaacatccttaaagaattgatagaccagcctgaccaacatggtggtgaagaaggaattcatgaattttacaagtataatcaaagacaaccaagacatttttactttttccttcaaaagcttagtatagcaacctccgcaccccgctccccaccccccatagtctaagttagagaagaatactaactacctgtttttccttctgtgctcagcaagccttacctacttgctaatttcatattccttgaggctcagcgagttcctgcttcacctccctagtgcagctgcaaagttacaaggttgatacagaaacatagtttcccagggatgtggaacatatagcataaataaatgtaaaagactgatcaactgccttttttctcgcttctgtaagtaggcttcctgcatcacatagctcccggccactgacagcttaaaaggtggctgctttctttgtccggggctcagacttttctggacactagtccaactgagccaggtgatcaccttttaataaagacctttcctgaactctgttcgatctctcttatctctgattgccccacaacatttctgggggctcatctgggattggagattgtaggtttctgtctcctttgcctatgggttagagccccaggacgtgggagatttgggactcttggcaccactgagtaacacagcccagaaggagaacggttttcccgtgtcttggagccttcccttgacagtgcaaacggaaccgactcaggagttgcaggagagtcacagagcagtgcgcaggcagactactgaaccaaggtaaggttggtccctagggaagcctgtcccataaggacagaaggggagcttgatcacctcccagggaacgaccacttatccaacccagagtagctgggtgcagcaggagtggcttgccaattttgatgaacctcgtgtccccactcacactggaaaaagggagaaaatgggctggaagagtggcaagtgcagcaaggtagagcttgctggcagggtgacaagagtggtttgccaccccaactgggagtgtgtgggagtgtgtgggtgtgtgtgaacctacctgggacacaagagagactcatttcacctgatgaggagtcctggggtaggagtggtgtgtgtatgtgtgtgaatgtgggagcctaactaggctcatctgggacatgagagaggctcgtttcatctgatgaggagtcctagggcaggggaggtgtgtgacagtgtgtgaaagagatggtctcaggagaggccaatgtggggagtgatgtggggaggtgcagatctcttagtgcagactgtgtcctccgaggcgagtgtgggatgagccagacctaggtcagtgcgtaaggccgacaggattagtttcatagcttcacagcagtagttgggtgtgacctggccaagcagcacccaaacctcctgtaataggacccggtctggtgaatctgagagtgaaagtgagagtgaaagtgtgctgtgagggaggaaattggagaaaaagcattgaagccgactccattagaatgtatgttgaagaactttaagaaaggctttgatggtgattatggaatgaagttaagaccgcagaggctaagaaccctttttgaaattgactggccctctaatgtagggtggccagctgagggaaccatagatatggaaataattggccaagtgttttgggtggtcactggggtcagacaacagcctgggtaccctgatcagttcccatacatagactcctggctgaacgtgattcagacccgtccaaaatggctacaggcctgctttgaagattattgtaagactctagtggctcgaacaaaacaaagaacaatagaaaagacccacaaagtgcaggcccaggagaaagagtagcaaggacaacaggaaaagcctgtcctacaggccccgccagaggagctagagactccatccccttatgttctaatttatccatctctggcaaggcttaggcgggaagccactccagcagctgcctccagagggttggactcagaggagagtaccccccaaacttcaccacataaggaagagccaggcccactgcttgataaatcaaaggaggaactccaggatgaggttggccgtccctggtcaggacacacccaagccatgcagatgcccctcagagaaactagaggacagatctatttagatgcacaaaatgaggttcaaggaggagaacagctttatctttataagcccttctctactacagacattttcaactgtaaacagcatactccctcctatacggaaaaaccccaggctcttattgacctaatgctgtccatcttcttaactcacagcccaacctgggctgacctgcaagcagctccttctgtcactgttcaatacagaagaacgctgcagagtaatacaagtggctaatcagtggctagaaagcaacaccccagtaggcatggcagatgtcaaagagtatgcacaacagactttaccaatagaaactgatccaggctgggactgaaatcaggcccaagggctgctaaactttctgagatactgagaggctctgatacaaggaataaaggctggagggaaaaaggcaacaaacactggaaaggtttcagaggttcattagaaaccagatgaaagccccagtgagttctaagagaggccttgtgaggcttactgactctacacaccttttgacccagaagtggcagggaatcagtgcatggttaatgcagcattcatgagtgaagcacaaaatgatattaagcaaaagttgcagaggctggaggggtttgaaggtatgaacattccccagcttatccaggtggcaaccaaagtgtttgtaaattgagatgaaaaagcaaagtgggaggccaagcgtagagtgaaggaaaaggcagagttcttggccacagccctggttgaaagagaggctggatttgcaagaggacatgaatgtgtcatggatgtggtcacagtagaggacaagctaggccagatcaggagaccaggacaggtcaggaaggtcagcctagactagagagagatcaatgtgtgagatgcaagcaaagagggcattggaaagatgaatgtccagagaaagaataggacaagggcaacaaccagagacagaatgactggacagagcccccttccgtcactgggcaaggcatagtaagatctgacgtggatctaattgggctggcagaagccaatgactaccttgaagactgagacagatcgggctccatctcattaggccccaaggagcctatggtctcaattgtagtagggcgctgaaaaatagactttatggtagacacaggtgctgaacactcggttgtgactcaaaaaattgggccgttatcaaaagactatgctaatattatcagagccacagttatcacagaaaagacaccttttttcaaatgaaagagatgtatgactggagaccgaaaagtccaacgtaagttcttatatttgccaaactgcccagtgccactattaggaagagacttactacaaaactgcaggctcagatctcctttacaccaagtggagataggaccttaagcctaaggcaaagaaaggttatggtattaacactcacaatccccaaaacagatgaatggagacttcatgaaagtagttgccaggagtatggaagaagatatagtgtggctgaaagagaaaaactattcacagacttacttcttaagttatcaggagtctgggcagaggacagtcccccggggctggtagtgaatcaagcacctgtcatagtagaactactacaaggaacctacctggtgcagatctgtcagtatcccattcccacagaggttaaccaagggattgcaaaacacttaaaatggctccttgaatttggaataatagagagatgtgtctcctcatggaatgctcccctattgctggtgttaaaactttctggtgactactggcctatacaagccttaaaggcaatcaacgaggtggtggctacactgcatgctattgtgcctaacctgtacgctatgcttgcacaaatacctgctagtgctgcttggttcacatgcttacacataaaagatgcattcttctgcatccaattagcccctgtaagccgagacatttttgcctttgattgggcccatctcagtatacctggactagacttctccaaggatttaaaaactccccaactatctttgaagaagcactagcctcagacttaaaggctttcactccacctagcgacccatgtatcttactgccatacatagatgatttgttactagctacacccaccagaaaggaatgtatgcaaggaacagagagtctcctttgagcgctgtggaaagctggctataaagtgtccaaggaaaaggcacagatctgtggccaaggagttcagtatcttggcttttacatctctcaagggcagcatgagcttgggtgggagcaaaaggagactgtctgtagcattcctcagccagacacaaggcggcaagtgcgggaattcctaggggcagctggtttctcccgtatatggatccccaactactcactcctagcaaaacctttatatgaggcgatgaaagggcagggaaaggagcccctcctttggggaaaagaacaggatatggctttcaaggaaatcaagaaagctttaattcaggcaccagcactagggctgccagacatgacaaaggccttttacctgtatgttcatgaaagaaaagaaatggctacagtagtcttagtgcaaatgctagggtcatggtattggcctgtagcatatttgtccaagcaactagactttgtggctaagggatggccaccctgtttcaaggaactggccgccactgccttgttagccgaggatgctaacaagctcacatttggacagaagctgataattcaggtgccccacacagttgtcaccctgacggaacagagaggacatcattggctctctaaccctaagatgctaagatatcaagggctcctatgtgagaatacatacatcaccttagagactgtgaataccctaaatccagccacactgttaccaatagaatatgtggaacatgggaagcccccgttatgtgccccagggtaccactgctgtgtagaaacagtggatgaagtcttttcaagccagaaagacttaaaggatcaacccttaaaagacccagatgttgaatattttactgatggaagcagcttcatatccaagggtgtcaaaaaggccagatttgccatagtcacattaagctcggtggccaaggcccgccccctagcggtaggaacctcagcacagaaggcagaatagctctcacaagagcactacttctagcaaagagaaagtcagcgaatatctatactgactcaagatatgcttttgccaccttgcatgctcatggagccatttacaaagaaagagaactgttaactactgaaggaaaggaaataaagaacaaaaaggaaatagggcaggtcctagaggctgtatgggctccaaaggaagtagcagtcttccactgtaagggacatcaaacaggaggaagtgatgagactacaggaaacagaaaagcagacaaagaagtgaaaagggctgcaatgacagaaataacaaagaaagaagagacttatgttatgccctcattagagcctccccttgcagagactcctaactactcatccagtgagaaggtgtggttcacacaggaaaatgggtgttatcaaaaaggaggctggtggaagttttcagatggggaggcgtgccattccagaagccattgccccccaatttataatgcagtttcaccaaggaacacacatggggaagacagctttagaaattctcgtagggcaatatttctatgtgccatgcctaactgccatcactcgagccatctgtgagcagtgtgttacttgcatccagaataacctaaggaaagggcctactcagaccccaggaattcaggaaacaggagcagtgccatgtgaaaacctgcttgtaaactttaccaaactgcctcaggctggaggctgtcagtacatattagtgtttgcaccttttcagggtggatcaaggcattccccaccaggacagaaaaggcatgagaaataaccaggatattattaaaagatattattcttagatttagaatgcctctacctttaggctcggacaacagaccagcttttgtagcagaagtagtacagcaactgactcagatcttatagattaaatgaaaactgcatacagcctatcaaccacaaagttctggaaaggttgagagaatgaacaagacaccgaaacaactgttgaagaagttttgccaagagactcatttaagatgggatcaggtattacccatggtccttctctgagtcaggtgtacccctactacattaaacgggtattcaccctatgagatagtgtacagccgaccaactgcacttatatctcaggtaaaaggaaatttaaaggaaattggagaactgaccctaagaagacaaatgcaggcattaggtgaggtaatacaagaagtacaagggtgggtaagagaaacaatacctgttagccttacagatgcaatacatccctttaaacctgctgactctgtgtgggttaaacgctggaatcctaccaccctcgggcccttatgggatggcccccatattgtaatcatgtctacccctaccactgttaaagttgcaagtattacaccttggatccatcacagccgacaaacctgcagcctcagttcaagaccagtggacaagtcagcaagatccagatcatccaactcgactgatcttgcggaggaaccaaggcacagcagaaaaagatgactgccctgccccaaccacaccagaggctggttggtaaatgcactgatgaagcttgaggaaacgtcaagccctgctctagtcacacaacaggaagctgactagtctacgcatggctgaagcctgaggaagttggtgctagataagtaaatgtggattaaatttgcaagtgtagttatactattgcttatactgattgttttgctgtcatgctatctttgcaattgctatcaaacttgttgcccaggaggatgcctgtgcatagtgtaaacttgatcacagtagtgacaataatgctaacaggcacgggaggaaaccaagataattgtcatcattatatgatagaagcttggtttggtaaaggtataacaaaaaccctgttatatcaaacttattattagtgtacaggaatcccctggggacatgtgtttataatcaaaccagctactctgtctatgacccaagtcatgggcaacctcaagtatgttatgatctaggcctcctaccctacaacttttggtttgaaattcaaatagggaaacctttgttacccacatatgccaatcctaataacgttggaactgggaaactcataagcaaaacacgggtattaccttattcacataaagaatcagtttctatatattttgatgcctgtcaggctgcacacctcagcaacctaatccaggagaagtctgcaagaacttaggacaagaaagagtcagcagtaaggctgctaagatcataatagaagaaccagaagaagaatgtcctgattgtaactttcaacggaccacacatgaattcagccaacacctatatacagggggagtagctctgcttgccagccaaaaagcaaagattggttgtgtgactaacacatgcaacccccttaatttgaccatattaaagccaaacatacctttttggactaaaggacatcaaggagagctaagctttgatcaagaaagagcaaacctaggtgtttcattggtcattattaaaaagactcaatgagctaaagttcaagtcagtccaatgtcacagttcagatttttcagatccttcaataaacattttaaccccaaggatccaaaagttcagattccaccaatgtcagccaagaacctatttactcagctagctgaaagtattgctactaatctttgagtcacctcatgttatgtatatgaaagtaccagtataagtaaccaatggccctgggaggctagaaaactaatgccacaagataacttcaccatactggaatttgttacaaggttcaatgtatatccaagtgtctgtctattaaaaacccctatcattggaagatactgcatagcatgataggaaaagactttcagactcccgtaggagatacaacctgtttagatcagcaatattttgaagagtctaagaacaagacacagtggagaagcttcatagacaattcctctgtatcagattttaaccctctctctcagtttccagcgctgaatcagttgtggtatcaactagacactacaaatgtttggagagcaccatcaggactatattggatctgtaagacaaaagcctaccaactattgcccgagaagtggactggagcctgtgtgttagggacaataagaccatccttcctcttgctcccaccaaaacaagggaagatttaagttacccagtctataatgaagaaagaaaaaggaccagaagaaacatctttactcagataagtactgtagaaaagataaacacaaacataaagaaggacattaagataggtagctggaaagataacaaatggcctcctgaaagaattatcaaatgctatgggccagctaagtgggcccaagatggatcatgagtctaccgcacccctatttacatgtgaaaccaaattataagattgcaaagcagtactagagatcatagtcaataagacagctcgagccgtggatctgttagccatacaagccactcaaatgagagacactatataccaaaataggctagcattagactacctcctggcctcaggaggagtttgtggcaagcttaatttaaccaactgttcctcacaaatcaatgataatagaagagctgttatggaaattactgccagaatgcggaggttggcccatgtcccagtccagacttggtccaggtggagcccaaactcactttttggaggatggttctcatggtttggaggctttaaaactttgataattggttttgtagctataattggaggatgtctaatactgccttgtcttttacctctcctcttcagaagcatccagtctactattgaagcaatagtggaccgaaaaactaccaccaaaatgatggtgctacaaaaataccaaccgatcccctgggaagaatatgtgcctacacaggaagagataaacgattatggtgctctttattaatctacatttatagcgagcaccaaagggggagatgaagaaagaattcatgaattttacaagtataatcaaagacaagacatttttactttttccttcaaaagctaagtgtagtgtagcaacctcacccacctcccccgaccccgccccggtagaatactaactgcctgtttttccttctgtgctcagcgagccttatctgtacttgctagtttcacattccttgaggctcagtgagttcctgcttcacctctctagggcagctgcaaagttacaaggttgatacagaaacatggtttcccaggtatgtgtaacatgtagtataaataaatgtaaaagactgatcaactgcctaagtacgcttcctgcatcaagtagctcccggacactgacagcttaaaaggtggctgctttctttgtccggggctcagacttttctggacactagtccaactaagccaggtgatcatcttttaataaagacctttcctgaactctgttcggtctctcttatctctgattgtcctgcaacagtgaaaccccatctctgctaaaaatacaaaaattagccaggcgtggtggcacgcacatgcctgtaatcccagctactcaggacgctgaggcaggagaattgcttgaacccgggaggtggaggttgcggtgagccaagatcatgtcattgcactccagcctgcaacaagagtgaaactccacctcgaaaaaaaaaaatgtcaaactagaattatatacccagagaaattatctttcaaaatgaagataacttgaagacatttttagacactaaatgttgaaaaattcactaccagcactatactacaaaaaagtttgagaagctccttcaatctgaagttaaattataccagatgaaaatacacacatgcataagagtttgaaaagcactagaaatggtgactctgtgggtaaataaataagcttttacttaattatttatatctctttaatagaacagcacaaaacctgggataagagaaatgtaagtatactattgtaaagttctcatcttctatgtgaagtggtaaaacttacatgaagttagactgtaataaagttataaaccctaaataaatcactaaaataataaaagaataataattagcaaactgacaaaagagataaaatttaatcatgaaactacttggttcatccaaaaaggcagacgatgaggaaaaacggaacaaaggacagatggaccgaacagaaaacaaaacagcaagatgatagtgttttgttttgttttgttttgcttggctttgctttgacatagagcctcactctgtcacccagcctggagagcagtggcgcgatctctgctcactgcaacctctgcctcccaggttcaagtgattctcctgcctcagcctaccgggtagctaggactacaggcatgtgccacaatgcctacgtaatttttttgtgtttttagtagagacaggtcttcaccatgttagccaggatggtctccatctgacctcgtgatccgcccgcctccgcctcccaaagtgctgggttaacagatgtgagccaccgcgccaggccaagatgatagttttaaacccaactatatcagtagtgacattaaattaaaagatgtaaatatcctcaattaaatggcagagatcatcatcatttttcatttgagacatggaaattttaagaaaaatgagatacctctacacacctactagaaaagataaaatgaaaatcaaacatttaaaaaaaaaaggctggtgaaggtgcagtttgggtttaggagaacgtggagctcttacattttgctggtaggaatgcaaactgtacagtcactttggaaaagagactggcagtttcttataaagttcaactcacatttaccatatgacccagatattccaattctaaatatctatccaagacaaatgaaaacttatgtttacttaaacacctacatgtccaatattaacagcagcattattataaacatcaaaaactgcaagcaaaccatatgtcctcttactggtggatgaataaacaaactgtggcatatctatacaatagaatactattcataataacatgccattgacataagtaacaacatagataaattttatatgtatatggttaagtgaaataaacaatatttaaaagacctcatgctacacagtcaaccctctgtatctatggattctacatccatggattcaaccaatagcagatcaaaaatatttgggggaaaaatagatggttgtgcctgtattgaacatgtacagacttttttccttgtcattatcccctaaataatttagtatagcaactatttatatatcatttatattgtattaaatactgtaagtaatctacagataaggtttaagagaggatatgcataaactatatgtaaatagtacatacttttatatcagtacttgaggacctgtggatttttgtatacacagggttcctgaaaccaatctgccacagatactgaggagcaactctaattctatgtatatgtctggagaagtcaaacttgggcacagtggttgccagcaggtggacttgaaacccaaaaagcagcatcaggaagtttttatgattgatgaaaatgtaaattttgattggggtggtgattatataactctttgtatgtatgaaaatccatagaactatacaacaaaagaataagttttactgttacataaaatttttgaaagtagctttagcacaacattttctagaagtcatctgaagtcacctctgtcgtgcataatccctctcagccctaaggtctgaggtcctactctactggaagcacctagaaggagagctctgctgttgtctctatcacagtctgttacaaaaagataattacttgttgactgcatgcatagtttaatctggaccataaggcatcacatttttataactcacattcccaataatttggcagtattaaatctcactaattgcacattatctgtatggacagatctaaataggaaaagcaaatagatggtttcagcaattacctaggtaattaaacttaagcatacattgatccaaacatgtgttagcatctccagccagcagggaatgtagagagttttgctcaacaaccacaaaatgtattttagtattttttccccagagtagaaacaattgcatccagatttcatacatttaataaattttcatagtttatccatgtttaaattttacataaaagttaaaattgcatacttgttctgttttcttttgctctgttgcatatcctaatgacttcaccctattttttacctaacacatgaataagtaaaatataatatttctctatgtaaaaatgattaagaagacagtgagataaataaaatatggacagacctgtttgtcttttccctttcctttataataagtggctaagaaaaagaaatgtatgcagagaacaatggttgtgtgctcaccaacattctgtactaaggtgtaaatatcataacctgagatagaagatttaaaaatgttcctcctccttgacgtctcttctaagcatatataaaaatgaaattgtctaaaatgaagatagttacatatgtatagatattaactatttatgataaaacaaactttggggaaaaatgaaggatccaataataaaggacactaaatttaataatccacaaaagatagaatacaaagtagccattaacttagggaaaaaaaatgcttacaacccagttcatgatataacatagaaccaataacgttgtgttcaccttgttttttatgtaaataatgagacttgaagatactgcagtgtaggctgaatgatgtatacacacagacactgtgtcatataatgtaaaaaattaaatgcatgtttcaactgtaacatatgtgtttatgagtaaatataacaaaatattaacaattactatctcatagttgcagaattacatatgaattaaaatttccaaatcttccacaatgggaataattgactatatttcttattgaaaaagctgttatttttaaactagtaataactaaaaacaaaagaaaaataaaacaaggacaaattaaaaactccaagaaagattttagtttcaagtcattgcaaaggtgcttctgagctgagaaaccttaggtagcctgtgtatcaactctggatttctatttcttaaactaatagagaggatacctcatagatttgttgcaaggactgaaaaaatagcatttgtaatgtagtagacaccaattaaatgtttccactgttactcatctagaaagcagttcactaatataaaataattatcaaggatatatccttaaagatgcctaaatagtcaaagaaatcatcaatcttaggtacacgatatatcttaagtgtgtcatccaaagcatgcatgttggagaaaactgaaaattccttgcttacatattagttctctataggaaataattaaattcactttggggcagataactctaaagataaattctactttcagagataaaattgcaatcaatgcagattttattatctaactttcttagtcaactgtgatcagagccttcctatatccttaacaacgccctgggtgagagtattgatcattatagttctcagagtgagaatggtagcagaagtgaataaagagtttgaacaagatgtttagaaagtagtaataatacaaattttccaagaatctaggagtatttatatagttagagaaggagacatagtttcacagaagtatttggaataaggaattttgttgattaaatatttcaacaaaatagacaagtatgttttatataattatgacgtggtcagcctgttcattgagctgtgtatttatagataagagaaggcataatgaaagtcaaattggggaccaatcagggaagggaagaaaatgagaagaaatgatttagcacctaatattaactaaacactttacatatattataccactaaaaataaatgtacagaatggcgagacaaatatagaaagaaaagcaaccattttatgaataagaattattgaatgcatttatatatatttgtaatatatcttaatcaaattttgttaagatgtgtattgattattgaatacctaggtaataactataattgtgtcccacaacagttagtgaaaatatgtgttgtaattttcaggatttcaaactaaaaaattcttaagatgtgtacccaattatacaattaccacctagaattatgtcataacaacttctaggcaaactaaagagagaatcatttattttaattatttgtattttaaaattcttatgtaatataactgcagaaaaaaattaataaaaacagtttgatgtcatggaagaatgaagtcagaaaaaagaaaaaaataacaattttaaaagtcgattgtgaattaaaatattccttaatatgataggtaaaatgctgatttttaaaaaaacctaagtataataatctatttgttcaataatgactctaattgtttttttttttaaaaaaaaaaaaagcttatttctcaccttccttaaacaatttgattcttctcaagtgaggcacaactcacacaacatagaaaaacatacatatggtactctcactgttgattttgtttgaagttcctgttccttatttgtatcacttctcaacatttctctgaacctggacagcatcatttgaggaccaaggaaaaattggagagggggtggtggagagtgacagtggaggaaacattttaggatggatcaacaaactttgtaaaattgtaaagttagtttttaaaaaattgctacttttagacactcttcagagttctagagtcccagtccccatattctcccaaagtttagccataatgtttaagagaaaaagtgaaagatagccaggtgtgggggtgtgcacctgtaaccccagctgtttgggaggctgaggcaggagaatcgtgtgaaccctggatgcggaagttgcagtgagccgagattgtgctattgcactccagcccaggcaacagtgcaagactctgtctaagagagagagagagagacaaaagtgaaatgtgaaagattttagcatctgtgccctgcccttggaccaagttcaagttgacattgctaccaccaccacctcgccaaggaaggatgaggaaaccaggctctctctgctctgtatatctaggataatacccactaccatgctatgggctgctgacagaccaagacttgaacagactgcactgcccacagtttcttgctcattcagcacacctgagtggagcaccgccctctctggtcacaagcccacacctagcatcattttgagagtttagtgatatgctgtgcctgacccttgggccaagtttgaggagatgcagctgcagctgccaaccagccagaggagggatggagagatcaagctcttctaagcacacttaggacaataactactcccctaatgccagcagctgtgggactgaggtctagcctgccccacccaacacagccaccaggaacaccaacatggaccagttgtgtcccagtgcattgctccaccaccactcatcatccacatgctacccagagatctgagagccttcccacacagctggctcaccactcccactactaacttttttgttgttgttgttttgtttcgttttgagacggagtcttgctctgtcaaccaggctggagtgcagtggcacgatctcagctcactgcaagctctgcctcccaggttcatgccactctcctgcctcagcctcctgagtggctgggactacaggcgcctgccaccacacccggctaattttttgtatttttagtagagatggggtttcatcatgttagccaggatggtctcgatcccctgatctcatgatccacccacctcggcctcccaaagtgacccactactaacttaaacaagctacttggaggccccaaaatcatccctccaggaccaactagcactggggccagtataggctgttctggggcctaaaaacaggcacatttaccccactctgccaccactggggtctgaagcctggttcagttagcatccaagtccccatcaaaactttgccacaacatcaactaataactaccttaagtcactgaggaaatcacagttaatacagactctgtgtactgctgaagaagtcatacaaaattatactatcacaggcacccaaaatcaaaaccaatatatcctactcaaccaacaatctacaaacatctttaggaaaaaattctcccctatagaagcactttaaaaaactgaaacaagtgactgctacaccagatgtgtagatatcagtagaaggacacagaaacatgaaaaagcagggaaatatgacaccaccaagggaccgcaacagtactcaagcaatagatcccaaccagaaagaattcctcaaagtgccaggtaaataattcaaaatatagaatttaaagaagctcaatgagatgtaagagaaatctgaagactcatacaaagacatcagaaaatcaattcaggatattaatgagaaatttacaaagtttcttgaaagaaaaaaagcataaattctagaagtaaaaatttcactgaaggaaatacaaaatacatccaaaagcttcaataagcttcaacaataaattagaccaagaagaagaaagaatctcagaactcaaagatacgtttttaaaaataatccagtcgggcaaaaaacaagcaaataaacaaacaaaaaaacaaagcctttaacatcttttactacatgaagtgaccaaacgtattaattattggtattccaaagaaggaggagagatcacaaagcttagaaaaactacttaaggaaagtggataaaaacttctcaatctaacaggagagtcagacatgcaaatacaggagtcccactatttcccaggcaaatacactgcaaatagtacatcactgtggcatattacctttaggaggtctaaaggcaaactgaaagaatttttaaattagcaaatgaaatgtatctagtcacctataaaggaagccccatcagaataacaacagactttttagcagaaaccttatgagccagaagataattgaatgacattttcaaagtgctgaaaacacacacacacaaaaaagttttggccaaaatatttatatccttccagaataagctgcataaatgaaggagaaataaagtatttcccagacaagcaaatgcaaagaaaatttttcaccaattaacaagtcctacaggaaatgctcaaagggatcctaaacatggaaacaaaaagtcaatattcaccatcacaaaaacacaaaaatataaaactcacagttcttataaaacactcacacaaaggaagaagatacaggaataaaatggcaacactacagaatctcataaaaccacaaagttcttcaaaaagataaataaaattgataaaccactagctaggctaaccaaaaacagagaagatccaaataaacacaatctgtaaagaaaaaagggatattacaactgacaccacagaaatacaaaagatcttgagagactattattaacaactatgtgctcacaaactaggaaacctagaggaagggagtaaacttctagaaacatacaacctcccaagactgaacctagaagaaataaaacacctcaacagaccaaaaatgagtagcaagattgaatcaacaataaaatctcacaacaacaacaacaacaaaaaatgcccaggaccagatggattcacaaccaaattctaccaaacacacaagaaactaatacatatcctcatgaaacaactccaaaaattgaggaggaaggaattctattctttctaactcattctaagaggccagtatcaccctcatatgaaaaccagataaagacacaacaaaactacagattaatattcctgaagaaaatagatgcaaaaaatagcaaatcaaatgccatagcacattaaaaaaataatacactgtgatcatgtgggatttattgcagggatgcaaggatagttccacatgtgcaaattaataactatgacatatcacataagcagaatgaaagacatcatctcaatagatctagaaaaagcatttgataaaattccacatcttttcacgagaaaaattctcaacaaactagacatagaaggaacatacctcacataataaagacaataaatgacagactcacagccagcatcaaacttaatggggaaaagttgaaagcatttcctttaaaaattggaaaaatataaggaagttcactttcaccactcttattcaacgcagtactgtaagttctcaccccagataaatcaaccaagacaacaaaataaaaggcacacaaattggaaaagaggaagtaaaattatctctgtttgctgatgatatatgcttatatcttgaaaaccctaaagactccaccaaaaaaactcttaaatttaataagtgaattcagaaaagtttcagcatacaaaattaccatacaaaaaccagtagtgtttctatacatcaataatgatctagccaaggacaaagttaaaaagacaatttcattttgcaatgctacaacacattaaaatacttaggaatatagttaatcaaggaggtaaatcatcacttggccaagcacagtggcttgccactgtgggaggctgtgagctccttgggaggctgaagctggaggattgcttgagctccagagttcaagatcagcctgggcaacatagggacaacccatttctacaaaaataattttaaaaaaaatagtcaggcatggtggtgcatgcctgtggtcccagctacttgggaggctgaggtgggaggatcacttgggcccaagaagtcaaggctgtagtgaactgtgatcatgccagtatacttcagcctggatgatagaatgagattctgtcaaaaaaacaaaacaaaaacaaaactctgtaaggataacaacaaattactgatgagagaaatcatagatgacacaaacaaatggaaaatggcccgtgctcgtggattggaaaaatcagtatcattaaaatgaccatactgcccaaagcaatctatagattcaatacaatttctattggattaccaaagtcatttttatagaattagaaaaaaaatctaaaattcgtatggaatcagaagagagcccaaataaccaaagcaatcctaagcaaaaagaacaaagttggaggcatcatattacctaacttcaaattatactacaaggctagagtagccaaaacagcatggtactggtataaaaatagacacacagatcaatggaacagaatagagaacacagtaataaagccataccctacaaccaactgatctccaacaaagtcaacaaaataacacactgataaaaggacagccaattcaataaatagtagtaggaaaattgaatagccataggcagaataatgaaactggacccctgtctcccaccatatacaaaggttaattcgagataaattgaacacataaacataagaccagaaactattaaaaaaaatcttagaagaaaacctaggaaaacctcttctggccattggcaaagaatatatggtcaaatcctcaaaagcaaatgcaaagaaacaaaaatagacaaatgggacttaattaaactaaaaagcttctacacaaaaaagaaacaatcaaccgagtaaacagaaaacttacaggatgggaaaaaaattatatgcaaactatgcacctgacaatgggttaatactcagaatctataagtaactcaaacagctcaaaaagcaaaataataatccaattaaaaagtgggcgaggacatgaacatacatttttgtaaagaagacatacaagcaaccaagaaatatatgagaaaacagttgacatcactaatcatcagagaaatgcaaattaaaagcacagtgggattttgggaggcagggcaagatggtggaatagaaagctccactattccccactgcaaagacatcaagttaacaagtatctacacggaaaaaaacaccttcataaccaaaaaatcagatgagcactcatagtacctagttttaacttcatatcactaaaagaggaattgaggagatagaaaaatcagctctgagtcactgacaccactcctcccccatccccaggagtggcggcatggtgcagagaccctctctgggtgctaggggaaggagaacacagcaattgagaggcattgaattctgtgctgttctgttagagcaaaaggaaaaaccagatcaaactcagttgacaccagcccacggagggagtatttaaaccaggccttgccacaggggaatcagcaatcccagtagcctaaactttagtgtcaagaaacctggccactgaggcccaaagtactctttgcctctaagtaagcttgaaaggcagtctaggccttcaggactgcaacttgtaggtgagtcctagggctgaactaggcccagaggcaatagattgaggggccatgtcacatactgagacatcagttagggaagttaagggagtactggcattaccccttccctaacctcaggctgcacaactcgtggctccaaaaaaagaccccttcttcccacttgaaggaaggagaggtaaaggtggggaggactttgtcttgcatctagcatagcagctcagccacaacacgataaggcaacagtcagagtcctaaggccccgtctcccctgttccaggctctagctcctagaaaacatttctagacatgccctggcccagaaggaaccccactgcctttgaggaaagaacccagtcctgacagcattcatcacctgctaactgaagagcccttgggccctgaataaccagcagcaatacccaggtactgcatggagggccttggcgagcctcagagatttgctggcttcagggacaaaactgctacaggagggtagagcaccaagtgggctcgtggggttcacaattccaggacttgattcttggatggcatttctggacctgccctgatccagagggagcccactgccctaaatggtgagtcccaggctagttagcattcaccaccagctgtcttaagagaaattgggacttaagggaaaatcactggtagtctggcagtacttcttctgtccaagggtggtggtgcctatggggtgaggctcccctgtctttggaaaggggagggaagagggggaatgactgtgtcttgtaatttgagtgccagctcaactgcaatatagtagaataccaggtagacttctaaggtttttgactctagtcgctgacccctggatagtacttctggatccactcagggcctgggggacctcaccaccctaaaaggaaaaacacaggtctgaacggcttggccacctgctgattgtagaacaccagggccttgagtgaacataggcagtttccagggaggagttacagtaggtcttgggcaagacccagtgctgtactggcttcaggtctgacccaacacagtcatagtgttggtggccacaggtgtgcttgtgtcactccacccccagatttaggtggctcagagcagagacagagagactctatatgtatgggaaaatataaggaaagagaacaagagtctctgctggtaatccagataattctcctggatcttgtccaagaccatcaaggtggtacctctatgagtctccaagaaccacagcattactgggcctggggtgctccctaaagcaggaacagcttagatcacaacactcaagttgtgacccaagtgttttaaaaggtctggagtgctgtcctaagaaggatgaccagaaataagcccagaaagtgaggactacaataaacacctaactcttcaatactcagacaccgaagaacatctactagcatcaacaccatgcaggaaaacatgacatcaacaaaggaactaaataaggcaccagtaaacaatcctggagaaacagaactatgtgaccttttagacaaaaaattcaaaatagcagtgttgaggaaactaaaaggaattcaaaataacacagagaaggaattcagaattctatcagataaatttaacaaagagattgaaataattaaaaagaatcaagcagaaactctggagctaaaaaatgcagttggcacactaacaaaagcatcacagtcctttaaaagcagaatggatatagcagaaagaagaattagtgaacttaaagacaggctatttgaaaatacagtcagaagagaaaaaagaatataaagcaaggtagcatgcttacaggatctagaaaatagccttaaaaggggaaatacaagatttattcacctgaaaaaggaggtagagaaagagataggggtagaaagttttattcaaagggataataactgatccaagataataacaaataacagggataatacccaaacctagagaaagatatcaatatccaagtataagaaagttatagaatatcaaacagatttaaccgaaagactaccttgaggcatttaataatcaaactcccaaaggtcaaggataaaaaaagggacctaagagcagcaaaagaaacaaataaaatgttatggagctccagtactcctggtgccagactttcagtggaaaccatgtaggccaggagagagtggcatgacatatttaaagtgctgaaggaaaaaaataagtttaccatagagtagtatatccagggaaagtatttttcaagcatgaagaagaaataaagactttcccagaaaaacaaaagctgagggatttcattgataccagaccgtattgattacaatgttcaccattgaggttttgggcacactaatagcccagacttcaccactccacaatatattcatgtgagaaatatgcacctgaaccccctaaacatagataaaaaataaaaataaagattaaaaaattaaaaaagatttcaggacaagtaatataacaggatagatagatagataaaaaaataaagatttcaggacaaataatataactgcatattggctgtctaagtttattctctaaattaaagacagctttttggctgttcttcagtgaataagtgctctcatttatctagagaacagcataatatttttaaaagaatctggaaatgattgaactaaatccaattaagctgaataactagaggagttaaaacaagtgtgcaaggcactcagactaaagctgcaaaattttggtatccatataaattttattaattttttaatcaaggtatttttataagaaaaagtcacttaattttctccaattatggaatacttatatatttattatatatttggaaaaaattgtccctagccatcattatgttgtgatagttctgcaattttaatgattgcataacatttaatattacagctattccataatcaatgtataaattaccctattattgagcagtcgatttatttataatttttagcattgttaatcaaattgtaaatgtcttctatagaaatacatacgtgcattttagatctttcattttatttatttaacaaacatttacataacacttatatgccaggcaatatattacattctttataaatattacattatttaatcttcttaacaattctgcaaaatagactataactactcccattttacaggtaaggaaaatgaggcacagaaaggttaatcatattttcaaggtaataaagctagtaattagctgaactgaaattcgaaccaggatactctggctccaaagctgacactcttaaatgttactttctgctatgtctctgaagtataaattctagaagaggatagggccagaagtattaacacttggggattattagagtattttattcacttatttccaaattgtatactatacccagtatacaatttattagtgtattttattattagtggggattattaatgtattttattcacttatttccagtatatgtatacaattttacatacctacaattggtgaaacaagatggcaatttcagtataacttcaacaatatactttttttacagtttgggaagagatatattatgtctcatagccttcaattgggtttaagcatttaaaaacatgtctattaatcattttttctttctttttaaaattgttccatgccaatgtatttatttctgcatttattcattcaacaactattcctttagtgcccaatatgtaccaggcacagttcaaggcacttgaaataagtctttgaagaaaatacatagactcaacatcctcaagaaacttatcttctacttgcagagatacaaacaataaacagcaaacataagtacagaggacagtatagataataactcctacgagaacaacaaaaaattccaggtaagaggattgatagtggaagagctgctgctcacaattgtaaacaggatgataaaagtaggcttcattgagaaaatggcatttgagcaaaagcttggaggtgagaaagttagccatcggcacttcaaggggaagaaatttctaggcagagggaacatccagtacaaaggttctaaggaggatcctacctggtgtgtccaaggaacagcaaagaaggctgtcaggatatagctaagtgtgcaggtacagtagtcaaggcgttgaaattgggaggtatgaggcagtggagatactagttaggtcatgtggagtttgtaagctattgtgaagactttggcttttatatgaagtgtgaaggcaagacttttgagattgttgagcagaggtgtgacataacccacttttaaaagggtcactctggacaacaaattataggacaacaaattataggacacaaagctaaaagcaagagaacacttaagaggctattttaagaattcaaggagagatgataaaacttagtgagtttgtagcagtacaggtggtaaagaattctggatattttcagaaggtaggaacaaagagatttcatgattggatgatgagtgagaagaaaaagactagtctatgatgaacccaggtttcttggcttaaacaactggaaggatatttctttccatgtttcaactagaacgtattttaaaaatatttttgtaaaagttatttatatataaataatttaaatccatctatgtcatatacattacaaaagttttctcagtttacttttgttaattttgtttgtgacatacagttttaattttgtatatttgtaggcaaccgtaatatttttctttcagtttcctgttttggctttcattattgtgcaaatataaacatttgcctagattttcctccatttttttgtttatcagtatacatttaatactttaccatatctaaaattaatcttgatatatgacatatcaaagtctttttcacttgtcatttattccagcatcattttctgtaatgctcttcttatcatctataaaattctattttggaattttccatttattccattatattcttcctcaagcatcaaatatctttattgttgttttggaatattactgtttcataaagctgtgaacattacattcattattcagtctgtttggctcatcttattatttgtaattccaagttgattaggaacaaccaagcaacatctaccttagattttgactggagtcatgttaatcttgtaggtgcatttaacaagaatggctattgctataacattgaatcttctactccgttgataattttttgaatatttgcagaattctcttcatcatcaaagttttaaaataaaatttataagaatgggtctaaatgtttgttcttttcgttcttttagttcctggttttcagttcatcctttccatttgagatctgtatcttcttttcctcagttgaaggggaatttttttttattacatccgtagttagttcttctgctgtgtctcctcttcagcaacattaggtatccaaaatattgcatttcagttatttcaccctaagaccctattttctctatttttatatctccttattctataagttattgataaatatattttctacattattggtcaaatctattatttactattttaatgttgataccaaataactttagttgtttttttttttttaactcagccaaccttcttttaactgcaatcagttgtcccatcatctcactcttcactcgttcttatatggatttttgttttcttaactaccattgagaacattgagcaatgctttatggaactttcttctgtttcctgttataaatcttttaaaaagtcaaccttatttctaaatcttgattgttataccttttcttcttgcattgctatgctgcattaggcctcattttgttgttgttttgttgtgtttttcttgtccacttctgcttaaatgacgaaagtggtagctgccctggcatttgcccatgtacacagagggtggattatccttggttctttttaccgtccatatgaatggaactaaatttctgtttctcatcttgagcttatgtgttgttttatatgcaaatattctagctaaatttctgatgtctggccaagatttacattgtgtgctgcctctcgactgaggaggaaattctcttgtatttatgataccacagggagaaaacttcatccctggataatataaattctttaaatttaaatcccaggaagaaagcatgcactacaacttctagacatctctaattatactccaactttacatttagaaggtattaataaggcaacaaggggacaacaacccctgttacaatgatgcaaaactcctggcccctttacagcctagccttagtggactacaaatataatttctattcttatgtttagtggaggctttgcatcttcaaaataacagtcgggggttgggggactaggggagggatagcattaggagaaatacctaatgtagatgacaggttgatgggtgcagcaaaccaccatcgtacatgtatacctatgtaacaaacctgcacattctgcacatgtatcccaaaacttaaagtataattaaaaaatagaataaattgaaataacattgaataaataaatgaatacataaactaacctaaaggaaataaacaaaaatgtcagcatattaggtcaatggcttaattatagattataataattatgtattatataagtatatttatagattatagataatatattatatatatattttgttgttgttgttgagacagtgtcctgctctgttgctcaggctggagtgcagtggcacaattatggctcactgcagccttgacctccaggctcaagtgattttcccacctcagcctccttagcagctgggactacaggcacgcaccatcatgcatggctaattttttaaattttttgtagagataggattttgccttgttgcccacgctggtctcaaactcttggcctctagtgatcctcccgacttggcctctgaaaatgctgggattacaggcgtgagccaccactcttggccaatttgtatacttataatttagattttatatttatactataattagtatattaacttacacttatatttgataaatattttaatatctatcaactcaattatttgcattatctgtcctaggaagtactttcctgacatcaagttccctaagatgtgaactttaatcagcatgctacttgaattttaatcagaatcatagagtaaaaattgccctggaagagtgttttatagaaactctagaaaaacccagcgaaatatgcctactccacaattgtatttgctgttctaatgaccagataatggaatccccaaatacagtagccctttaccattaaaagtattagatgttttggaaaagagagagtgatgagaagcaaaaataacaataataataacagatacagagattagttgaagattgaaaatcttacagctctagtccttcaaggcatgatccctccccactatatactttcatagggaatgatattgctaatgttcctgccgaaaatgttcagatattttggcattttcaaaggcaaggaacaatacaattactcctagatttttgccattatagcaacatctgatttattgacttttcagtaactaaataatatcacaccaaaagttataaaatgacttcccaactctcttctgttgatatagaccccacctaaatgtatattattatcatttattatttttatttttactctccacaggttcttgtgtactatgtttaacattgacaagaagataattaggaaataaatatatataaatacaggaacataaagagaaataaagaggaagcaccacagtcaactaaaaaagagagattcccagcaacctacacaaccatttctataggctctcagctgatgcttagtgtttggacaactcacacatgcagattgacagatgaccaacttataaaagagatttttaataattcttaatgatttcacagggtgttgtcaatggaaatatggattcttctacagcaaacatgtacatctatatcatgtggaacaaggatagtgggaaaacctctgattgtgaggacgtagaactgagaagagcatatgaaatgtcataagaaaaacacttctggagcatgtcgtcttcaagaaaatggtgcccagacagtcaggattgtgttacattttaataggaatggggatatttgtgatatactgacaaaccaagacaggtgactataaaactgcaatgtaaagtgtcagcttctcctcacacctttatagtagacatctgagaacctcactcctgtcagcatattcttggggttgaatctcaagtgatccatagaatcttagataaagcagatgaaaataggcttttctgtcttcctaagtaaacagcaatgaagttgagagaaagaagatattgctggaagtcatgataaagtctatcttctgtgaccatatgtttccttagagagttttagacattgaccctcatctaaaaaattgtgaaaaaggactctcaccagtctgttaatatgtatgtatatgaaagaaattactggtaaacttctaaggcaggcattggtgttacttttttttatctttattgtgtctgtgaaatgattgtgtgtattttttctttgattagacaatgagattcccaaataaattttattaaagccaaaaaaacctttatacctttttgagattctaatatttatgtaaaatatagtctgaaatacacaataaacagatatttgaatacatgaatttttaaaccattacttaagaaaccaatattttcaagtttaaaagataacatgttgaaatcaaaatttaattttcttacctttctgggtatgtaagtgattttaacatgagactctggatcttgtatgtgcatgtggaacactgcagatttgagctctggaaatatgtcaaaccaatgcttgaaatatttacaaagtcattataaaattgagcaagaatcttgacttcttgaagtttataaaatggtttgttctttctagagagaaaatttgatacacgcagcatattaataatttgaaacataactcaattctaaaatcaatataatcctaataagggaggccacagagaacaaaattatagggaaaaggccaaacaaaatattattgcagtatttattaaaataattaaaaccgtaatttataacagaacaaaataataaatgcaaaataataataaatgcattccctcatagaactattttgaaaatgcttcttttgggaaaaagtgacatgtctttctgagtagatgtctagattttacatttgactagaattagagaagtcatcctatatgtgttttttacagttccttaaatagactaggtgcttaacggacaacttaaaaatattttatcaaatatttttgacctagagcaataacttataaaggcctgagattcaaaacagaaatacagtgtttaataagtacaattttctgtgcatttacaatgtaattaagctttacatgcttaacctcatttaactacctgaaaaactccttttattaggtactatgagtattaccattttacagataagaaaactgagcatcagagcatataaatgtctttcccaaagccacacagctaataatgctcctcactgctctgctcaatttctcatccctatgtgccagaaatgtgggtccctggagtcatttatctcaacctgggctttcatgaccccaagaggaactccagctactctattgcactttttctcactagaaaaaactgatggcaaagaggagaaagagaaggagaaggaggaagaagaggtgtaggaggaagagatgaaggaagagaaagaaaagtagaaggcggaggtggaggagaagaaggaggagaaagggaagggactaaagaagaggacagaagtgaagggaaaaaaagttttttaaaaaatcagttcaaagaagtttctcttttgagccaacaacaacttggttaatcaaaggtgacaatcacacagagaacagctgaagagtaactagtagggcacccagcactccctgccatctcatattttttcctgctctctttttgattccttgcagcagttagacaccagaaaaaggacatgatcattctactcaaagtccatttctgctacctcctggcagggttaccaccttctttttcacagactataatgtcattagatatatcactaatgtctttccatgaacatatccaaatttttcagtgataattcaaattcaacatatccagataggaatgtgttatctttccatacaaactcacagccacaccagtgttttcaattaccaacagtttgctcatgactacaaaatctctaccttcagctaaggcctgtatgctaagttttagttacatgtatccactgtcatttatcgtgtccatgtggatatcttaaggatgcctgaagctcactaggttcaaatctaaatgactcatcttctccaacactttctccaaccaaaaaaaaaaaaaatactaaaactaaaacttacattgtctcagagtattaaatggcatcaccacctattacccaagtcaaataactaggattcacccttgatagtgcccttctttcaacctccacattcaatctatcagaaatttatattgactttacctctgaaatatcaaaactgatttgaatccctcatttttccatttcaactataaaccttcaaacccagggcaccattgtgtcatgtctatattcctgcaacagcatcttgctttgtatctctccaatccactgtggttaaattgtttttccaaaagaaaaatccaactgtggcctcaacctgactgccacaactaaaatacttcagtggttttcatgtgcccagtgaataaaatataaattctggaacatggcctatgagttctaatttctataatatatctaagtgttctctagatttctcctctctttcttactttcccagtctctattttttttttttttttttttttttttgagatggagtctcactgtcacccaggctggagtgcagtggtgcaatctcggctcactgaaacctccatctcccaggttcaagtgattctcctgcctcagcttcctgagcagctgggactacaggcacacgccaccacacccagctaatttttgtatttttattagagacagggtttcaccatattggccaggctggcctcgaactcctgaccttgtgatccacccaccttgaactaccacagtgctgagattacaagcgtgagccaccatgcccagccccagcctttattcttaaacacactaaactgccttcagctcctgaagtgggtcatgcttctctatgcttcagattttctgtatttattggtccttctgcctagaatgcagtagggcaatgactgctgttcaccattcaggactcgactaatataagcatcaatagagaaacttttagtcaccccactaattgacatcccctattttaattttctatatacattatgatttatgtcaagacttttttatgaacagattttacttatataattttataattatttgactatccttatatgtctcattatgctacaagcttaatgaaggtaagaccatgactgattttctcaccacagtatccccagcacttaacacagtgcctggctccgtgtagataatcattaaaaattgtttgaatagtagaatgatggacatcgttgttttatttttattattaatttaaaatctatctgctatagacatctaatttatataagagcagacatttaatttgtccagaattgtatcccctattcctagcacagatccgggtctatagaagaactcaataatttgtaatgaatggattaaattggattctctccatgtatcttttagctcagtataatagcattatactttttaaatagtcacaaagctcaaaacttgaagtcactctagattggtttctttccttaacgttcacttattcaattaaccatgcaaacacacaacatgtctattctaaagccccaaaacctctggaatctcccttaccctgtttttttgttcccactgatttggatccaggctcatgttatctttcatatgaattatcacagtaactacttctgtagcctcctatctcacgtcttgctccctctaatctctccattactcatatgtctgggccatctttctatcctgaatatccaatattgatatttcccatttaacatcctatattggcatattaatatatctggtccaatgaatcattagtagtatagaaaaaataacattcagtataaaaatcaggatgcagaacacatttcaatcagatcctaattttgctaaataaaaaaaatcatatgtctgcacataggggcatgtacaagaaggaggaaggggaagaatgattataaaccaaatgcaaagtgtaggtattcctggatggtataattacaggtgatccctattttctattatataatattatacattttctacagtgagtaaatattcctgtttccattttaaaaaggaaaataaaagatcatttaaaattctttgactcctgtgccatcttaaagacaattaaaatcccaaaacataattaaatgtatactcatgtgctgcacaatgatttttttgtcaacaaaggactgaatatatgacagtggtcccataaaattatgacactatattttcactgtacctttttctatgcttagatatttttacatagacaaatatttaccattgtgttacaattgcctccagtattcaataccgtagcatgctgtacaggtttgtaacttattgcttctaggttataaacctatgctacactccatatagcctacgtgtgtagcaggctataccatctaagtttggactctataatgtccaagcaatgacagaatcacctaaatatgcatttctcagaggatattcccattgttaaatgatgaatgactgtattagcaaataattattaacagaaaaacagtaaacccattagccaagattaggtggacagattacaacacatgcgtatatgttcctgtattttatattccttcacaacagtgcactaactaatccaagtagctgaataaaattaatcactatttcatgctgttccacatagaatataatgtttgtaaattaactcaagaccaacagtttctttgccttctgaacaaatttgaaacatctgttctaggcctgtgttcatgtgcaatttttgaatttagatactgtattagtctgttctcatgtggctatggagaaatacccaagacttggtaatttataaagaaaagaggttcaactgactcaacaggtctgcattgctgaggaggcctcaggaaacttacaaacatggcagaagggaaagcaacatgacctacttcatatggtggcaggagagagaagaatgagaatcgagcaaatagagaagccccatataaaaccatcagatctcttgagaacttactctctatcaagagaataatataggggaaaccacccctgtgattcaattatctccacctggtcccgcccttgacaggtggggattattacaattcaaggtgagacttcggtaggaacacagagttaaaccaaatcattccacccctggccttcccaaatctcatgttctcacatttcaaaacacaattatgcccttccaacagtcccccaaagtcttaactcattccaatattcacccaaaagtccaagtccaaagtctcatttgagacaaggttagtcccttccacctatgagcctgtaaaatcaaaagcaagttagttacttcctagatacaatgggggtacaagcattgggtaaatacacccattccaaatgagagcaattggccaaaacaaaggggctacaggccccatccaagtctgaaatccaatagggcagtcattaaaccctaaagttccaaaatgatcccctttaactcatgtctcacattcaggacacgctgatgcaagaggtgagctcccatagctttaggcagctccacccctgcggctttgcagggtacggcccctcttccagctgctttcatggctagcgttgggtgtctgcaggttttccaggtgcatggtgcaagctgtcagtggatctaccaatctagagtctggaggaatgtagcctttttttcacagctccacgaggcagtgccccagtgggaactctgtatagggctccaatcccacatttcctttccacactgccctagcagaggttctccatgagggctctgcccctgcaccagatttccacttggagctccaggcatttccacacaccctctgaaatctaggtggaggttcccaaacctcaattcttgtcttctgcaacctacagaaccaacaagaatagtatgggggaaaccactcccatgattcaattatctcaacctggtccaatccttgacacgtggggattactacaattcaaggtgagatttgggtggggacaaacagccaaactatatcaggtactctcctatctctaggtttttgatacatgctttctgttccctgactgtattgccttgctttcaaatacttccttgattcttctctgggctccaacagtacattaagtgatcttcttttataaaacattttactaaaagctacaattatgcatgagtctccagtattctgtgactttcttgagaacaaaatactgtctgtgtcagtttggatccccattattttgagaaatgcctgaataagtttgatgctgaataatttgaataagcaattgaatcaatttaatagccaaaaatcctgtttttgataagaataaataatagatcatgtgtgaatgtgtatgtatatacatacataaatacaattgtaagcaatttaaagtaatgaacaattatggaataatattagttattattttagaacattcagtgttcaaaattaggtgaaaagggccgaaaagtttctctcaataaaagatgggtcttgacgaaagtcaagaatttggattggaatttttgtttaatttcttttatcttctttgggtgacggaaggttagtttaaaaagggaaaggaaaacggataattgttactctttcactaccagttctatacgactgttaaatcatctgcaatgtctttattaactttaagaaaattacatttatacaatctaatattaaacatatgtttatccaaaattttaaacattttgctggacttgtaacccagggtactatctcaggataatcatggcatcccttgatggaatggtttttatgttacttcagtacacaggtattttatattttcgttatggtgaacttatcattattttctttgtggattccaatgtttgaaaggtttacctactattatgagctatggctactttttatattttaatatcgtttcagattttacctgtgctaataatactgtaacattaaatactttcactgccattgtttgtgaatgtgcaaataaataagtagtcagggactttctcctggctcacagagtttagatgtcactatgtactcaggtccaaggtccatcgcacattaatttagttaattagttaatttatgtactgtaactacctatactgtgacagcagtaaatgttggaaataccaaccatgcttcctgaaaccctaatgtgttcaataaccagtcaaaacttaagccaaattgctctgtctatccacaacaaaatacacttttatatttcttttaatcactagatatggtgtctgtgagccttttgaaaatcgtttcatcatttaatggctagttagaagtctagcacagcaggttggaaaccacaactatatggtagtgtgcccgtttatatcattcttttatttaagaaaaaaataattttctagtttaagaatttattaaacacagaaatatatattcaacaagctcaagccaagagcattcttttatataattatataaccttaaaatatgtacacacacttgcacatacatatgtacatacataaaaagttaaataaaagattgagaaaaaaacaaaaccctcccctattgtttgggagccttgtaggtgggaatagttctctgaaacactaaaattgtgtcactctatttaaagaagtcacatcactgtgaacatgatattaactgaaaactggagggaattagaaggcaatatggttaggaaaaacactccaatgagagtcataagagagagaaagacacaaagtcgtcttttactctttaacttattttatttatttatttatttatttatttatttatttatttatttatttgaaatggagtcttgctctgtcacccaggctggagggcagcggtgcaatctcagctcactgcaacctccacctcctgggttcaagcaattctcttgcctcagcctcctgagtagctgggactacaggcacgtgccaccatgcccagctaattttctgaatttttagtagagacagggtttcaccatgttagccaggatggtctccatctcctgatacgcttagaacttttaaagtcactagttgtttagagtaagggtgcctctttaacatatgttatctttctctgtaaaataaaggaattagaatataacatatgagatccttttaatatttaacattttaagactctctagattaaaaaataaactacactatttaaattatctgttggatgggatactgaagaaagcaaacattgaatatatgagagaagaaaatagtaaattttacttactcataaagccttggctcttcaatcattccaagctgatttaataatttaaatgaaaacgagccatccatcatagttttatctggaacaattatactgagaacaaaataataggctacaaaataaaaatatagaatacaactcacattattttttaatttttggttttggtacatattcagatatatatatatgtgtatgtatagatagatatgtaatctaggctcatattacatatgcaaataatattattgagaggactcatttggtaaatgggtaatatattttaccttttgtttgtcaatttttgactactcttaaacatgagagatgaaaaagcctgccagccagtaatgggtatggtgaagtattgaacaaatagatcctaaatactggcttgtctgaaaaacaaaaacttttcagaaattaggccaattaagcaacttttacttttcaatagcagatctaaggtgaatatggtaagatttcttaattatctgattaatagtaccagctattgcttgccaaacgtaagtcctaatttcactggctgttccagaatgactgtgaatatatatataaggtaaggtcatagcagttcttattcaaattgcctttactaaactttggtagagtatatcttgcacaggaaaggatgctgaactcacttctatatattgccaggcctgtacaggaaattttgactacaggagttatcccaagttttgtgcaccccccttctagaacagaacggatttataattggattttccccatttctgacacaagaggtataaggaaacacttctcactttgaagttacctcacagccttaggcaaagtactttgattcaccttgcccatataaatgggcattcagacttgctcagattatttctgacagcacagaatattgagatgttacagattaagccaccctcccactataaatacatggaaatgctaggtgtacaatccatgtttcaatatgcaaccaagctctgaagaaggaaggggaagtgtcagaaagcagaaacaaagagaaattaaagccaaggccagaagaactgaagccctggacccctctgggacttcagagcctgttgtagcatgaagatggaggctgaagtgtcaacctccatgcaggaacaggagaaatgatgctaaaggacaaagctgaaatggaggtccctgcacagagccataaacctcataattgaaattccctgacccatcattgaaagaggaactaggaaaattcttcctattttttcagtctgggtcttacgtgaaaacataaattgtttcttgagattaaataaaactccagaaaacatgaaatttaagtttacactatttatatgttgaaagacccccacaaatttacattaaaatgcttcaggattgtggtaatatggttctgaaaaaagaaaatctgacttgctctgaaggggaactttgaagaagagctgatttctgagagttttttatatcaaagatagacatgaatctctattttgaagtagcacaaataggttttttttaattaatttttaatccagacttgacaaaccactgagactggaaaataacaatataaaaaaataaatcaatgaatacattcagtctgatgaaatgatagattatcttcacagaaaaattagatagaagataaatgaaaaaaagtgtatctgaaaacaagagaagtcgtattttcaatgtgctgagcatataaactttcaatatagaattctgtcctaaactatcttttcatttctgactgagggaaggataaggacattttcaggaaagacaaaaaaagaaaaagactgagaaagactactattgaaaagctactactaggatatacttcagcaagaaaaacgttaaaaccagaaggaaggagttgaaggagggaataagacaaaatgtagaaaactgaaattggtaaatataaggaagtatttgatgatactatttataattaatatgtattattaaatgagaaatggaaggaaaatactacaggatataatattgaagatagaaaagaagaataaagattctaaggctctctgaggcaacttgtagctgtgacagagtctgataaaatagtctgtgaagcaagatccatattcatgtataaatgcataaaaagcaaaaaaataagttagtcgctgagaaaatatgatgtcccaaaagttttatgcatctaaaaatcacggccttggaatatctaaagccaacacctaaacagaggaactgcccgctaaaataaaagttttaaatagatctcagattttgacacaagagatacaatgtccaagatatgatcaaaaattgcccataataccaagaacaaagaaaatcacaacattgttaagaaaattacctgatgctaaccctgagataaattagatgctgagattatctgacatttattttaaaggagccatcacaataatgattcaaagttaacatgtctcttgaaaaaatgagaaaaaattaaaaccttagcaaagaaaaaaagttgtaaaagaaaaaatgaagttacagaaacaaaggtggctccatcgtgcaatgaatagtgcattggacttccaaaattacagaaacaaaaaatacaattgcagatacaaaactcacatgatatactcaatagtgagtagagataataaaagaagaaatcagtgaacttgagggccagtcaatcttaatgacagagaaaaaaagatggagaaaaataaatgaacaaagcctcagggatctgtgggactataataaaagatgtaatatttctgctattagagtgtcagaaagagaagagagtgtggggctgtgacatgatgcctggaaactttctaaatttggtgaaaaaaataaacacagattgaaaaagctaagtgaacctgaaatataataaacttcatgaaattctaaccaagagacatcataataaagctgcaaaagtaaaaacaaagaaataaaagtcttgaaagcagccagaaagaaatgatgcattacctacaggagaacaccagtttgaatcataatggatttcacatctgaaagtcatggaggtcaaaagaaaatataacatttttcaagtgctgaaagaaaatactgccaacctcaaatcttacatccaacaaaactgtcctttgagaatgaaggggaaatagagacattgtcagacaaagaaacagtaaaaaacaaatctcactagcagaattatccttagagatagtcagaagtaatttcttcatacagaaaggaattaatgaaataatcatgaatcattatgaagaaagaatgaacaatgagaagagaataaatatgggtacatacaataggttatctttttctcattgattttgtaaatgttaaggattgaaacaaaaatttttacacaatctaatattcaaaatcatgataattaaatgtggggaatgtaaaggggcctacatggaagtgaggtttccacattttacttcaaatggttaaatgttggaatcattaaacagtgatgaataatgtatgcatattgtaattgttgtaggcctccccaaatatatccttgtcctaatccctggaacctacaagtatgttatcttatatagcaaaggataattaagattgcaaataaaattagagttgctaaccagctattcttaaaatagcgacattttattgaattatctaggtggacccaatgtaatcacaaggggccttaaaagaggaagaggaagaggaagacaaaagaggagaatcagaaacagagatgtcgtgcagaaaaagggtcaaaatgatataatatgaagactcagcccactaatgtgaatgaaaaggccacaagccaacaaatatgaacaatttctagagctggaaaagttaagaaagtatattctcccctgagcctccagaaaggaatgcacctgctaacaccttgactttagcacagtgacatctgtattagacttctggactaccgaactttaagatagtatatttgtgttgttttaagccaccaaatttgtggtaatttgttagtgtagttatagaaaatcaatatacattttgatacaaataatgtgatatagctataaaaaacatatacaagtggaaaagtggcttctaaattagaaataagaagaagctggaaaaatttttaggaacataataggaaagcctagatttccttgaataaattgttagtttattcaactaactagaaatgtgctagtaaggacacaggaggaaataaggaacatggcagagaaaatacacattacaaaaaggctgttggtgagaaatatggatgtctaatggaatgaataaggatgttaatcttgccgtcattgaggactcaaacggaaattagaaatatattattggaaactggtagaagaagaatcctcactacatcgtggcaggtagcttagtggaattatgtactgcaatttatgtggaaagcagaaattgtaaatgaagaaattggaaatttaaccaaggggatttataagacaggggttgaaagtgtggccagatttctccttggtgctcatcatgaattgtgtgaggaaagacagaaattgagatgaaaccgttaaattaaaaagaatcctgacttgctgatttgggaaatcctcagcctagcaagtttactaagatacccatgttaagaaatttatcaatgggaaatgaagctctagagaaaaagctgagggtgtagctggcacaaccttttccctcagaaagattttaaaaatcagagcatttagtcacacaaaagggtctttgaaaatattaagcacatgactcacagattcctttagccatcttggcagaggccaataatagaggcaggattgtctagaaaaaatatggaggagtctcttttttaatagaatgactctctgtgacatatacggagatccaccaggctttggagaacgttatagtggtataaatagtgccaacttggactaaaagcaacagagtataaaatgagaaaaagttttgaggcctggaaaacgtctacaaacaagaaacaagatgaaaaaactactcagatgcaaacatatgctaccatttctacatttaaagaagaagggggtgaaagaaagagagaaggactctaagagaccaacatgcgaagccatgaacccagggagcagagccatgaaccacagagaattattcccaggcctttaaatcagatggagtttgcctggctgaatttaaaaattgcatggagtgttgactctatttttcttctacttttcttctctttgaacaagaatgctataactggtatcgtatccctgtctcatcactgtatttgagggggaggtaatttgattcctgagattcacaggttcacagatgaagaaaaattatgtccaagtacttatatccagagctgtagccaaatctgatttagatgaattaggcaacaagatttagaactttgtatctgttgagtttagaggagattttttactttaagttgatgctgtaatgacttgatgatgtctgagatcaaccaacaaaatattactttatacccaaaaaagcagaatacacatgtattgccagtacacatgaagcatgagcctaaagagatcaatgcttgactactaaaatacctcaggacgttgttaaaaaatttatacagagtttgatttctagccataataaaattaatctaaaggtcagtaacagacaacaggaaaatttctaaactgtggaaattcaacagcgtgcttataaataacccatggtcaaagaagagttctctaaaaaatacatagaacagaataaaaaagatacaacatatcaaaacacatgagacacaaatcaggcagtactgagaggaaatttcacagactaaatgattacattagaaatgaagaaatatctgaggccaataatttaagtttctgcctcaagaaaatagaaaaagaacaaaataaacccaaatagagtagaagaaaagatgtgtgtgtagaaatatatattttatatatatattaaaatatatatatgtgtgtgtagaaatatatatatagagagagaacaaagcagaaattaatgaaatttaataacagaacatgatagaaaattaaacaaaaatctgattcttgaataaaaaccaataaaatcgataaaccattttgtctagcaagacagacaaaataaaaagaatcaagacacaaatcactgttaggaataaaacaaaaggcattactaaagataatgcaatcattaaaaagataaattttaaaaaacctactgttcacaattcaacaccttaaaaaaaaggaccaattccccaaaaaccacaaactacaaaacctcaaccaagctgaaatagataatccaaatagtcttaaaattattaaataaattaaatttgtagtaaaaacttcctcccaaaaaagtctccagacccaaatggtttcactggaaaattctgccaaacatttaaagaattaacacaaatcttgcacgatctctttcagaacagacaacagagaagggaaaacttgcccactttttttatgacgttgtattattatagtagtacgaatacgctattactgttatgccaaaaccagacaaagacaataagaaaggaacactactaacaaatacctcttatgaacttagaaaaattctcaacaaaatattaacgaatgaaattcaacaatgtattttaaaatacgcactaagcccaagtagaatttattactggaatgcaaagcttgttcaacattctagaatcaattaatatagttcaacatatcaacaaactaaagaaaaaaattatatgatcatatcaattatgcataaaaagcatatggcaaaatccaacacatatttatgaggtaaaattcttggcaagttaggaatagaggggaactaactcaattttatagtgtatctacaaaaaaaactataagtcacatcacactttaatggcaaaagattggattttttttttctctaaggcaaaggtatctgtgcttaccactattattcaaaatagcactggaagttctagccatggcagcaagtagatttaaaaaaattaaatgcacacagattgtaatagaagaaataaaagcattcttatttgcagaaaacataattgcttacatagaaaattccaatgaatctattgttttaacctagaaacaataaatgaattcagcaagttcccaggaaacaaattcaacacaaaagatgcgatctcattactatataccaacattgaatgtggagataccaaaatttagaaatacattttacaattactccccaaaatgaatatgtggtatacacacaacaaaagatgcacaggatctgtatgttgaaaattgtaaaatgctgactgaagaaatcaaagaatcaaagtatatggaaagacataccatattcatgaattagaatattcagcatggtaaagacatcagctctccccgaattgaaagatgtggttaatgtaatttctgttgaaacctcagacaaatttttgcaaatatagacaacgttatgctaaaatttatattgaaatgtacatacactagaagatctaaaataatcatgacaaagaagaatgaagaggaaataatcagtctacttgatattaatgcttactatatagctacattaattaaatgctatgtggtactagaaaaagaaatgaacacatacataaatgaaaaaatatacatatcaaaatacagacccaacacaaataggtacaaacatatgtcaataaacatatcgatatatattgatatctatattatatatctcatctacagagatatattttaaccaattgttgataaagatgcaaaagcacttaataaaagagaatctatcaacaaatgatgctggagctataaaaaaaactaaatagaaatggatttcagatgtaaatgtaacacatagaactattatttttagaaaaaattacaggagaaaaccctcaggacctagggctcaacacagagttcttagacttgacacctaaagcgtgatacatacctaaaataatgatcaattactcctcatcaaaactaatcactttttctctgcccatgcttttgtgaaacagataaaaagacaagttacaaactgtatgaaaatatttgtagatcaaatattgacaaggactagtttagaaattatataaagaattatcaaaagtcaacagcttaaaaaaaagcccaattgaaaaatatccaaaagacacgaatacacatttcaccaaaggtgataagtagaagaaatagtcaatataatcatccatcagggcaatgaatactaaaaccactgaagcatcactgtatgcctgtcagaatgcgtaagaatttttaaaataatgacaccaccaaattctgaaaaaaatcggaaaaattagatcacttatattttaattgggataatgtaaagtggtacagtcactccaaaaaaatgttaaattttttcaaagctaaatgtgcaattagtttctgtcccagcaataacactcctgggaatttatgacagataaatgaagacatattcacacaaaaacttatacactatattcaagcagctttatttgtcatagccaaaaccttaaaacatcccagatgctcttcaacaggtgattggttaaacaaatggtggcacatcctgtatctatgtaaatgtatacgtatattccataaatagtatctatatatccctatagatatatatgtaatatatagttatatataatatatagtaatataggtaatatctattatatatgacatataatatctatgttatatatgtatattatatatacatgagtataatatcaatatatattatatatagatattatatagctattatatatagaaatagatctaatatatagatatctataatatatagatatatagatatagatataatatccatatctattatatattaatatattatatctattatatatataatatatatctatataatatattaatatataatatacatatataatatattaatatataatatatacattattatatattaatgtataatatatacattattatatattaatgtataatatatacattattatatattaatatataatatatacattattatatattaatatataatatatacattattatatattaatatataatatatacattattatatattaatgtataatatatacaaatatatattaatatataatatatacattattatatataattacatataatataacatatattatattaatataatatagatatataacatatagatatatgtatttctctatttatagatatatagatatattatttcactcagcataattccctggaggttcatccctgtagcatatatcaatgattcactatacctttagttgctgagtagtatcccataggaacatatctctacccctattgatagatagatagatagatcaatatgtattgatatatatatcatatctctggatatattactatggaatactactcagccactaaaagtatagtgaatcactgatacatgctacatggatgaacctccagggaactatgctgagtgaaaaaataagccaattaaaaaggtcacatgctggatgattctctttatataacaatcttgaaataacaaagttctagaaatgtgtgaatggataccggggggatggggtacgtagttttaaaggcacaacacaaagattccttgtggtgatgaactgttcagcagcttcattgtggtggtagatacagagccctataaatatgactattttgtatggagccaaatacacatatagccacacacgcaggcaagtgtataggaaaatctgattaagatgggtgcattgtatcaatgtcaatatcctgctactactctatggcactgcaaaatgtttatcatttaaggaaactaaagtatatacagtatctctgtgtatgatttcttacttctacatgtaaatctaaaattaactcaataaaatttttaatttgaaaaatggacagccccaattctgtttgacaggacacatcactaatgtttgaagaataatatattgaagttggcagtgactgtgactggaagacattaaaaatgactgacctaaaatattttatgagaatctattttaagtacttatctctcagtaatcaaaattaatgacagtaattcaaaacttcctccataagattcttcacataaaaaggactcattttatttacaaaccacttccagtttttcatttccaaacagaataattttgctttctttaatacttccttataaatctattatttattatatttctatgagattctctcttcttctacaagttttctcctcttacctaactctaaatgtattatgaggattactactttcttgtccttttttatatttatatattaataatctagttttattaataatgggtgttcagactgtatatatatatatatatcataggctccttaatatgttacatgccaaaataactctagaggtgaaaagggcaatatgcaaatttaggatgaaggaatgcaaccttgattgtttctttgggaaaatattacccaagcgtctctccattttatctaaaaaaagatcaagtccttagttgaatttgtcccactggctatagcaaattttaaatttgcctgaaagaacatgatggaatttgagtgggtgcaaagaacactttgaatcaaatgtagattagtgcaaaaaaaactaaaaatttgtttatttgttaaaattgttaataacttactacagaatggatatgtaccacttgtatccaaaaacacagtggtcctaagaggtcttccttccatcctttcttttaaaacacctttaaatagcttggcttgataacctgagatttgagaaatagaacattagaaattggatttccatcaaataacaaaaatgtcaaatcactaaagtaactaaaagatcagtgcatataatcatcataatgatcatcatggattttgataacttaaaaagcattttttcaaataatgtagcattccatttattttaattacaataacaactcttaaattcaggattcacaaataaatctgctccctgaaaatcttatcagagcttagcatactccatccgtatggctatagtccatttgtagaagttttactgttataaattcaggattttacctgtaattccttctaataagttcagcagagtaaattgactacataaaacttaaacatacaatatagctccatgagtatagctccctaattctccaatacgtataatacatacagatatggcatgcatgtgtatacattatatatattatatatatgtagtataggtatactttacatgtactgtatgttgtgcatataatatacatatttcagatacatatgtgtacatataaaatatttattatatataatatgttgatatattgataaaaattacttataaaataaagtttatgttaatatatatttcatatgcctcatgtatttctttgttcccacattgctacctccaaatttgagatttgaatatggtagaaagaatagtaaattaagaattcagaggttttactcaagttctaacttatgcctttatgtgatttatatattcactctgggttacaatttctcattacatggaagaaggatggggccagaaaagcaatccacaacaggaggtctgaagaaaactaatcccacatggtgtcttatagacagaaaagtctatgagaaaaatcaaattggcaatgcctgaacagtgcatacccctcctagggtgttctcagtgtgtgctgatcctgcttcagcagttggtttaatttagcctttgtaatcactacctattcctcgaacccctttggctttggaaacatctctggggaattctgccatgatactgaccagatgtttacatgctcatggcatgcttggatctggtgctctttttgaaaaaccctgagcaaacagcctctgaaattctttccagttccaatattatatttttatgtggatttttttctctataattccctattggcaggttttagttatcagaagtagcaatacttaactgctcttagcaggtttatccatttagaaggtatgaaccatgtttcatgtctacttggtgatagcaaatgagaagctaaccatggctcacacctcttcacttgttcctaaaatctcaaaaaaacaaaaaaacctcagtgttgccaagactgtgcaagtttctttctttaagtgaaaatatagttggatgatagttagatatttttgtacatcaggaacaagaatcattataaagccatctaatctgcccactacactgaacataaaaaggcagttgatcatgttcttctctttaaatatattaaaaatgtttagtagggaatgaaatatttactctgtaccacatctctacagatgatttttccataaaatggtcatgtattaacaagtaaacagagtgcacagtttagcttccagcagaaaatactaacaattatgttattcatattaaataagaatgatagtaactataataatctctcttacccagccgaggacatgatttttccttaaaacagtcacagtccacacataagctagtcttgtaatctttgtatgaacgacaaggaaatgaaataaaattgcagtttgtttctaaagatgccatgaacaagtgaactgctctctggtggttgcatttaatgaattgaattccttaagggttaaaaaaaaaacaaagaactgtagatgtattaagccatgttcaagtacatttaaaaacaaagtaaagatgaagttttgctaaatactatgtaccttatgaatattactgactataatacacagttttatgtcaaaccactaaacaaatagtaccaatgaaaacttaaatttagtatgtcttttgcatgagatttataatgaatttttaaagtaataattaacatagcaaaaatgtttcatttcagtgtttcacaagctctacacagtgctactatacttaataactagtgtacacatcttttccttctaatactgcactcctaacatttccacctaatgacaaagatgaccatgaaaccagctgaccttaaaactttattaccttccttttcttttccaaccttgcacatcctcctccttttcaccaaacttctttagctacagtgccctttggtcacgtgttatttgaccagttgccgttgtggacctaagaacatttcttgcaatggctctgatgtgagccaaattccacacctggggaagttgctcagctatctttatgtacagaacaatcaagtgtcaagagtttttacaattgtctttgtacagtaatatggtgatggttaagattaaatcctgagatcaaagttgtattatatgatacttgagctacatgtgcttcctcaatgacttacgacttctcctaatgtttaaaatgatggaataaaattattaaaaatataatataagaggtctcatccatgacctaatggatgtctactggtaacctttatgaactaagcatggtcaaattaaaccattgttaaccaatgactctcctgagtcatgggcaatgatgatgaaatcaaaacactgcctacagattaagaggggaaaagtaagttattttctttcatcatttcgaatattatgtagttcattcaaaaatactgtcagtatacctgagaaaattgatttaggacagccaggttgtttatttcctccatttggataaaaatctatatgtcccaagggctcttgaatgcctaaacctgagaagaaaggcacccaagaatcacaacatgtatataatcaggtgagtatcttgcataaaacaaaatagcctataaaatccattgaaagttactctttaaatattagaattgaaaataagtgctgtttttataaagataagtttttcttctataattccttcatgaaaagtatatttcattaatttaatatatttgccagtcagcagtttactatcggtcagtcacagttttttgtggtatgaccgcataagtgaaaaaagaaatagagagggcagccaagatggccgaataggaagagctccagtcttcagctcccagtgtgagtggtgcagaaggcaggtgcagaaggcagcatttccatctgaggtaccgggttcatctcactagggagtgccagacagtgggcggaggaaagtgggtgcagcgcaccatgtgcaagccgaagcagggtgaggcattaccttactcgggaagcacaagggatcagggagttccctttcctagtcaaagaaagggtgacagatggcacctggaaaatcgggtcactcccaccctaatactgcgcttctgcgatgggcttaaaaaacggcccaccaggagattatatcccacacatggctcggagggtcctacgcccacggagtctcactgatggctagcacagcagtctgagatcaaactgcaaggcggcagcaaggctgggggaggggtgcctgccattgcccaggcttgcttaggtaaacaaagcagctgggaagcttgaactgggtggagcccaccacagctcaaggaggcctgcctgcctctgtaggctccacctctaggggcagggcacagacaaacaaaaagacagcagtaacctctgcagacttaaatgtctctgtctgacagctttgaagagagctgtggttctcccagcacgcagctggagatctgagaacgggcagactgtctcctcaagtgggtccctgacccccgacctccaagcagactaactgggaggcaccccccagtaggggcagacagacacctcacacagccgggtactcctctgagacaaaacttccagaggaatgatcagacagcagcattcgcagttcacgaaaatccactgttctgcagccaccacggctgatacccaggcaaacagagtctggagtggacctctagcaaactccaacagacctgcagctgagggtcctgtctgttagaaggaaaactaacaaacagaaaggacatccacaccaaaaacccatctgtacatcaccatcatcaaagaccaaaagtagatgaaaccacaaaaatggggaaaaaacagagcagaaaaactggaaactctaaaaagcagagtgcctctcctcctccaaaggaatgcagttcctcaccaacaatggaacaaagctggctggagaatgactttgacaagctgagagaagaaggcttcagatgatcaaattactccgaactacgggaggacattcaaaccaaacgcaaagaagttgaaaactttgaaaaaaatttagacgaatgtataactagaataagccatacagggaagtgcttaaaggagctaatggagctgaaagccaaggctcgagaactatgtgaagaatgcagaagactcaggggccgatgcgatcaactggaagaaagggtatcagtgatggaagatgaaatgaatgaatgaagcaagaagggaagtttagagaaaaaagaataaaaagaaatgaacaaagcctccaagaaatatgggactatgtgaaaagaccaaatctacatctgattggtgtacctgaaagtgacagggagaatggaaccaagttggaaaacactctgcaagatattatccaggaggacttccccaatctagcgaggaaggccaacattcagattcaggaaatacagagaactccacaaagatactcctcgagaagagcaactccaagacacacaattgtcagattcaccaaagttgaaatgaaggaaaaaatgttaagggcagccagagagaaaggtcgggttacccacaaagggaagcccatcagactaacagcggatctctcggcagaaactctacaagccaggagagagtgggggccgatattcaacattctgaaaggaaagaattgtcaacccagaatttcatatccagccaaactaagcttcataagtgaaggagaaataaaatactttacagacaagcaaatgctgagagatttttgtcaccaccaggcctgccctaaaagagctcctgaaggaagcactaaacatggaaaggaaaaaccggtaccagccactgcaaaatcatgccaaattgtaaagaccactgaggctaggaagaaactgcatcaactaacaagcaaaataaccagctaacataatgacaggatcaaattcacacataacaatattaactttaaatgtaaatggactaaatgctccaattaaaagacacagactggcaaattggataaagagtcaagacccatcagtgtgctgtattcaggaaacccatctcaagtgcagagacacacataggctcaaaataaaaggatggaggaagatctaccaagcaaatggaaaacaaaaaaaggcaggggttgcaatcctagtctgtgatgaaatagactttaaaccaacaaagatcaaaagagacaaagaaggccattacataatggtaaagggatcaattcaacaagaagagctaactatcctaaatgtatatgcacccaatacaggagcatccagattcataaagcaagtcctgagtgacctacaaagagacttagactcccacacattaataatgggagactttaacacctcactgtcaacattagacagatcaacgagacagaaagttaacaaggatacccaggaattgaactcagctctgcaccaagtggacctaatagacatctacagaactctccaccccaaatcaacagaatatacattttattcagcaccacaccacacctattccaaaattgaccacatagttggaagtaaagctctcctcagcaaatgtaaaagaacagaaattataacaaactgtctctcagaccacagtgcaatcaaactagaactcaggattaagaaactcactcaaaaccgttcaactacatggaaactgaacaatctgctcctgaatgactactgggtacataacgaaatgaaggcagaaataaagatgttgtttgaaaccaatgagaacaaagacacaacataccagaatccctgggacacattcaaagcagtgtgtagagggaaatttgtagcactaaatgcccacaagagaaagcaggaaagatccaaaattgacaccctaacatcacaattaaaagaactagaaaagcaagagcaaacacattcataagctagcagaaggcaagaaataactaaaatcagagcagaactgaaggaaatagagacacaaaaaacccttcaaaaaattaatgaatccaggagctggttttttgaaaggatcaacaaaattgatagaccgctagcaagactaataaagaagaaaagagagaagaatcaaatagatgcaataaaaaatgaaaaaggggatatcaccacccatcccacagaaatacaaactaccatcagagaatactacaaacacctcgacgcaaataaactagaaaatctagaagaaatggataaattcctcaacacatacaccctctgaagactaaaccaggaagaagttgaatctctgaataaaccagtaacaggctctgaagttgtggcaataatcaatagcttaccaaccaaaaagagtccaggaccagatggattcacagccgaattctaccagaagtacaaggaggaaccggtaccattccttctgaaactattccaatcaatagaaaaagagggaatcctccctaactcattttatgaggccagcatcatcctgataccaaagcctggcagagacacaacaaaaaaagagaattttagaccaatatccttgatgaacattgatgcaaaaatcctcaataaaatactggcaaaccgaatccagcagcacatcaagaagcttatccaccatgatcaagtgggcttcatccctggcatgcaaggctggttcaatatacgcaaatcaataaatgtaatccagcatagaaacagaaccaaagacaaaaaccacatgattatctcaacagatgcagaaaagttttttgacaaaattcaacaacccttcatgctaaaaactctcaataaattaggtattgatgggatgtatctcaaaataataacagctatctatgacaaacccacagccaatatcatgctgaatgggcaaaaactggaagcattccctttgaaaactggcacaagacaggggtgccctctctcaccactcctattcaacatagtgttggaagttctggccagggcaattaggcaggagaaggaaataaagggtattcaattaggaaaagagaaagtcaaattgtacctgtttgcagatgacatgattgtatatctagaaaaccccattttctcagcccaaaatctccttaagctgataagcaacttcagcaaagtctcaggatacaaaatcaatgtgcaaaaatcacaagcattcttatacaccaataacagacaaacagagagccaaatcatgagtgaactcccattcacaattgcttcaaagagaataaaatacctaggaatccaacttacaagggatgtgattgacctcttcaagaagaactacaaaccactgctcaatgaaataaaagaggatacaaacaaatggaagaacattccatgctcatgggtaggaagaatcaatatcgtgaaaatggccatactgcccaaggtaatttatagattcaatgccatccccatcaagctaccaatgactttcttcacagaattggaaaaaactactttaaagttcatatggaaccaaaaaagagcccgcatcgccaagtcaatcctaagccaaaagaacaaagttggaggcatcacgctacctgacttcaaactatactacaaggctacagtaaccaaaacagcatggtactggtaccaaaacagagatatagatcaatggaacagaacagagctctcagaaacaatgccgcatatctacaactatctgatctttgacaaacctgagaaaaacaagaaatggggaaaggattccctatttaataaatggtgctgggaaaactggctagccatatgtagaaagctgaaactggatcccttccttacaccttatacaaaaattaattcaagacggattaaagacttaaacattagacctaaaaccataaaaaccctagaagaaaacctaggcaataccattcaggacataggcatgggcaaggacttcatgtctaaaacaccaaaagcaatggcaacaaaagccaaaattgagaaatgggatctaattaaactaaagagcttctgcacagcaaaagaaactaccatcagagtgaacaggcaacctacaaaatgggagaaaattttcacaacctactcatctgacaaagggctaatatccagaatctacaatgaactcaaacaaatttacaagaaaaaaacaaacaaccccatcaaaaaatgggtgaaggacatgaaccaacacttctcaaaagaagacacctatgcagccaaaaaacacatgaaaaaatgctcaccatcactggccatcagagaaatgcaaatcaaaaccacaatgagataccatctcacaccagttagaatggcaatcattaaaaagtcaggaaacaacaggtgctggagaggatgtggagaaataggaacacttttacactgttggtggaactgtaaactagttcaaccattgtggaagtcagtgtggcgattcctcagggatctagaactagaaatagcatttgacccagcaatcccattactgggtatatacccaaaggactataaatcatgctgcttaaagacacatgcacacgtatgtttattgcagcactattcacaatagcaaagacttggaaccaacccaaatgtccaacaatgatagactggattaagaaaatgtggcacatatacaccatggaatactatgcagccataaaaaatgatgagttcatgtcctttgtagggacatggatgaaattggaaatcatcattctcggtaaactatcgcaagaacaaaaaaccaaacaccgcatattctcactcataggtgggaattgaacaatgagaacacatggacacaagaaggggaacatcacactctggggactgttgtggggtgggggaaggggggagggatagcactaggagatatacctaatgctaaatgacgagttaatgggtgcagcacaccagcatggcacatgtatacatatgtaactaacctgcacattgtgcacatgtaccctaaaacttaaagtataataataataaaataaaataaaaagaaaaaagaatagagcaaaattccttgcagtcgaaaatactttatagtggaaggaaaccataataaacaagtaaatacagagtatgtgaaataataataagtgctatggagaacagttaagtagaacaagaggacaggaagggtctagtgagggtggtagttgcatgtttaagttatttggtttaggaatttgccacttgaagaagttggagtggagcacaaatgtgaaggatgtgaggcggtgaccccagtggatatttgtgcgaatacgctcggcgaagaagccagcgtggctgaagtctaatgtgtaagagggagcttcggagcaaaggaagccaagtcctacagatccttttcgatcagtgtgatgatttgctttcacttttggtcataatttctaagacctgctggtgctggattcactaactggaaaaaaatctaacaactaagttgccttggctggagcagtttgagtcagagtgacatgaaacacatagctttgattcaagggtttatgtagccctgtagatcattggaccactggtgaatgtacagattctgagcccattaccggcatataactcagagaagccttaacagtgaaaagggctagcaagctcagaatactcaggactgtgatttgatacaaaattgtgttgctaaataagataacaatgctttaatctggggcacaaaagatttcctacaacacagtgaactcatgaaagacatcagtaatagatttagcataaaacaaagataaatagatggttctgacagtaagggtttagatgctgcaacctgacttagttctaggatgtaacagaacctctaatgagttgttagtagcacatgagaacactgggcatgtacactgaggctggagggaggggagaagagcactatttaatgggtaaggaaagacaaaggacaatgtagatgacttcatgacaggtccctagaattcaggaaagcttgattgggacaatggtgacttgattgggacaatggtgagggtatgctagccagtctgtcttaaaatcccatcatcttcttagcctgtgaaattcacgcaaggaagggcatgcttcctaaataagaccaaaaagtttttaaaacaagaaaaaaatttaacagggtcagagatttgtgaaatttcctcatatatgaactcgacatggagttccaagactaggggtttccagtttggaactgtcattttctccaacctgccactgaaggagactcaaaccaacaggactgcttaggaatcaggagggataaaagaaatttgtcattaactttgaagcagcccttgattcaggcatgtcatttcccttttatcagattgggtggggggcagcttggtctgcttagatcattcattctcttggtttcaagaagggtggggagagcagctatgactttttaattttccttttattgtaaaatataagacacatgcagaaaaagaacattaaacataaatctataggctaattaattattataaagcaaacagccatggggctaccacactaatgtaaagaaatagcacctgggagctcccagtgtgcccttacccagccacaagtgtctctctgtcccctaatcgctaacccatcatttttttttaaataaaatcatctgttgtttattttattttattttattttattttttagaaatggagtctggctctgtcgcccaggctggagtgcaatggcatgatctccgctcactgtgatctctgcctaccgggtttaagcaattctcctgcctcagcctcccaagtagctgggactaaaggtgcatgccaccatgcccagctaatttttggtatttttagcagagatgggctttcaccatgccagccaggctggtctcgaactcctgacctcgtgatcccccgcctcggcctcccaaagtgcttggattacaggcgtgagccaccgcacccggcctgttttcattctttatcttctaaggatgactcccaaaaccctatagtttagatttcacctttgtgaaaaaatatatgaacttactcatattttatgtaggcttttgtttctggctttttagattattagtatgtttgtgctatcaatccacattgtcaggtgtaaaaacagtcatttattgtcatatagtatttcattgtatgaacatatcacaacttatttttccattctcctattgtggtgcatttgtattgtttcctatttgaggctaatgtgttcaaactatgaacattttgaacacatatattaatgcatatgtgaaggtacatctgttggttacatacctaggagtggaattgttatagattatgagtatctttgattttaataaataatgctgaatagttgtagcgtatctttgccaataaatggtcttgtcaagcttttgaattttaagcatgtggcttcttgtttgggttttaatttatatttttttcttactaactttaaaaactttttatatgtttattgcctattcagaatgtatccttcataatgtcctgactttttcttaactaggttgtctttgtctttattactgactgatagtaggtctttatctcttttactgcttttttttatggcttgctcttcacattcttaaagtatttataacagtctcaatttttatataatctgacattttaatcttttcatttgggttagaaatttttgtgtactttgggaaaatattattcattatcccagtgttatgaaggctttaaaaataatagctcataaaccatttattttcctttcacatgtatgcataccacaaggaaataatttttgtgttttatatgagttcaaggtttttttcatcttcagaatccagttgactgaaacagaaccaggtaattactgatactagctgtgtcttctctttttgttctgttttttctctccaagaatttatttttagaagagatgtatgaagttcaagcattctatgttcctttcattgtatggaaagaaggcacaagtgggccgggcgcggtggctcaagtctgtaatcccagcactttgggaggccgaggcgggcggatcacaaggtcaggagatccagaccgtcctggctaacacggtgaaaccccgtctctactaaaaatacaaaaaattagccgggcctggtggtgggcgcctgtggtcccagctactcgggaggctgaggcaggagaatggcgtgaacccgggagttggagcttgcagtgagctgagatcgcgccactgcactccagcctgggcgacagtgagactccgtctcaaaaaaaaaaaaaaaagaaggcaaaagtgatataaataaattttaaaataataattaatttttatcttttctaaagtgcaaaatttggctttttaaatcatctgcaattcataatttttattccattaatttctttggtatgtttaatatttgcttctttctccatttctgtgtgtttctatcgtttaattcttaatttttcaaaatagatgcttagattattgattttcagccttttaaaacagctgtactcaaaactatacattaacttctagccatggcctttgctgaatccaaaaaggtttaatatgcaataatgtgaatattcaattcaaaatatttgattatattatttattattgtattcattagttatttttaaatgtgatttttcactttcaaaaatgtatggattttagttatatttttgttatttatttggattaagtgcattaaagatagaaaagattatgatttctacactttgaaatgtttgagaatattgtttttttttcagatacaaacatttttatttgctttcaattctttttttttttggttacatttcgctaataatgccctcatagctctgattatatttatttatttattcttttattattattattatactttaagttctatggtacatgtgcactacgtgcaggtttgttacatatgtatacatgtgccatgttagtgtgctgcacccgttaacgcctcatttacattaggtatatcgaaatgtttgagaatatttttaaggctcagtatatgcttaacttagctaaaatatccatttgtgtttcagaagactgtaaattctgcagttctcaggtgtaatgttctataaatgtctattagatcaattgtgttaattaaaattattcactatgattgtgtagttgcctttttttgcaatgtgttattgttaatactgcattatgtatttgaagctgtgttattaggtacatacaaactacaattgttatatcttctttgtgagttcaaagttttattattttaaagtttgtccatatttttattagtttatataaaatcaattttgtctaatatagatttaccaccatttggaggataatatttgcatattttttatcacccttctactttcaaatattttgcttccttgcttttatatatgtctttaataaataagagttggattttttctttttaatcaagtttgacagccataatattttaattagagcataagtccatttatcttaattgtatagttgtgtttgattttactatcttattatctaccttctatttgctttagctgttgtatgcattctttctctcttttcttgccttcttttagacttcataaaaagtatattcaatttttgtccttcattttcttgcttcttttcttgctagataccctaaagattcaacatgaatactatacttatgaatatcaattactgaaggtcattttcaccttctttctatacaatgaaaggaacacagaaagctggaaattcatttatcacccaaaatcatatgctatttttagcttattttaattttctatatttcaagtccataaaacattattaatagtattttatgccatcaacatatgcttagatttaactagttcattgttcttccttccaaaatagccacaatctaagaataattttccttccacctgaagaatacatttctgctcatgaatgtctgaagggtaacctttctgctcatgacagtttctctccagtttaaatttgtctgaaataaaatacatttattcttgaaacagattgagatactatcttagcagttgtttcctttcaccatatggaagcaatcattctgttgtttcctatattccattgtttctgttgagaactcaattgtaactctggtcaattttattcaccttatttaaataaacttgtatggtttgatgatggccttttctgcaattcactatcatacatctcaatggagattaatctttattatttttcttattgaatggaattaattgggcattttgaacttgtagactgattatattactcagtttgggaaaattatgagataatatctctttaaatatagtctttgttccatttttctgcctttttattccagaattctaacacaatgtaatttaccatgtcattgcctatcctatgcatctcttaactgttggtctatattgtctattctttggtacccatttgcttcagtctagaaatttacttttcacctactttttagttcactcgctcactctctctttacctatttctaattttctgttaaacccattcaatggatgtcaattattttactttttagggtaagaactttcattatttttgtcaaatataattgataaatttatacttactaattttttgttaaatttttcagtcttctacctttttgaaaatattaatagcaaaaaccacaattacttttgcaccaacttaataataagcacattttttatagccagtgtataataattccaatatctggaggcctatgggtgttgtctattgactgttgtttctgctgtttctcattcacgctgtcttgctccaagtgtgcctggctatcttggatgctaaacatttattttaatatgtttttgtaaaaataatttgagattgaattatgtgaatttcctacaaagaaggctattgtttgcttctgtcagataactaggagttctaacaattcagaatctacttaaacaaaaaactcagtaaacgtgattttggcagaggcaactcagataacgagaagctttctgcagaccataagaaggctgatttgttcagctttacccatgcttctataatgtcctttggagttccagacaagaataacagatgagatgttttgcaaacccaatatgagggtttcaaaagcatctatcttttggatattggactcataattttccccaatatctcagcaaaaatgtatgccctaattatctaatccacaaatttgaaaggccacatggctttctgaacactcacaactgaataaaaatgaggattactggcaagtagaagatgtggtcattatctagtattcaaggaaaaggcagttcaccaggtatgtgctgagtccacgcatatcattcagaaatttctcggacaggtacatatgcagcatcaaaaaatctgtgtttcttatttgtgatagtcatgaaaagatcaatccaatgttccaactatgtggcctctagtggcagattagatctgataggttgcatcatcaaaagatgttgcaaatataagacaatccaagacagttcattaggataagtcaaaaatgcaaacaaaaataataaaaagtatgaagagctaagtcaaaaggccataggcagaattgaagttagtgttgcaggaagtcagggaccccaaatagagggaccggctggagccgcagcagaggaacataaattgtgaagatttcctggacatttatcagttcccaaataatacttttataacttcttatgcctgtctttactttaatcccttaatcctgttatcttcataagctgaggatatatgtcacctcaggaccactgtgataattgtgttaaccatacacattgattgtaaaacatatgcgtttgaacaatatgaaatcagtgcaccttgaaaaagaacagaataacagcggcttttagggaacaagggaagacaaccataaggtctgactgcctgtggggtcgggcaaaaagagccatatttttcttcttgcagagagcgtataaacggacgtgcaagcaggaaagatatcgctaaattcttttcctagcgaggaatattaatattaataccctgggaaatgaatgcattcctgggaggagatctataaatggccgctctgggaatgtctgtcttatgtggttgagataaagactgagatatgccctggtctcctgcagtaccctcaggcttcctagggtggggaaaagctccgccctggtaacttgtggttggaccagttctctgctcttgaaccctgttttttgttgtttaagatgtttatcaagacaatacatgcactgctgaacatagaaccttatcaatatttctgctttttgccctttgaagcatgtgatctttgtacctactccctgttcttacacccccttccctttttaaaacccttaataaaaacttgctggtctgagactcaagcgggcattgtggtcctactgatatgtgatgtcacccctggtggaccagctgtaaaattcctctctttgtactgtctctctttatttctcagctggccgacacttatggaaaatagaaagaacctacattgaaatatcgggggtgggttcccccaataagttagagtttcagaaaaaattcagacaagggactacacattaattggccaatagatgtgttttatgtggatgtgccaagctgatataaagagttagagataataagacatgagaggtttggataacactaaactatgacttctttggttttgactgcttatagaagtaggtgaacctagattccaaaaaggagcagaattgttaccagtggagtctcagtctattgacatgtagtcatggtggttgaaaaattgcatctatggcatttacgtatctcacacacagacacataaacccaagtatagatcaccacaagataaattcagaggagcaatcttagtgtcactgcccttgtctctatcttaccaccatatcctctcctgattcggtttataagaataatatactggttaagtgcatcatctggaatcaaaacatatgatttcaaattctgactctgccatttactgaccttacaacctttattctagtttcctcaactgtaaagggaatgacagttgttatctatctaacggaaatttagtagaattcactaattaattcatacaagcactcaaaacactgcctaatgtataggaagtgctcagtaaatattagtatcaacaaattcaaatcaggaaaggcacgaggacagtctgtttcttaaaagtgtctgttcaattgtactctggccaaaaatccaataccctgttagagattttcagctaagataattaaaaacaatagaaagattatttccttacatttaaggaagactattctttatttgtggctgaaatgctgtgttcagttctagtcgatatatatcatagcaagaaaataagcggggagaatggtaacctaaatacatcaggaacattaaacatgggggaaaatgtgatcaaatcaataaaattgtcaacagcatgaacagaatgaactcttagttatctatttcagtgttttaggatgacatgacacatcttgaaacccgaaggaggcaaactgaagtcaaagagtgccatttgacaatgcaggaaatcactaaccctaagaaatattgcttgggaaatattatcattctataattacagatttaaaatcattttatccatgatgttttttcttcttatgccctcctcttgcccaaggtctacattttccttttcattttcaaataattaggtaataaatcctgatttgttaccattggagtcagaatggatgacatccacaaactttgcatccgtgtaatctaatctgctatatggtggttttctggagaaccttggcccagcagggtcaagacctggaaagcaagaaagaaataatcagtctcatcaagtccacagagctccttacattgcatacttccattattactgcattataaacataaaaagcatttatacttttagtttaaacctatccaagaacatatctaaaaacaaatggaagtgaatgaatagcaggtaacttcagtatttgaataatactactaaccttcagagcttttcaggttaagccgcaacaaaatattgtcggaatttttggagtatttttctgtgagactgaattaggagtaataaagtagtttatatttaataataactacaactatttctcctgaaggaaaaaaataatgaataccatctggtcctctcttgaactctgtacattactagctcactttggatttatctgtagatagacctgaaaagcttttttaggtgccaaatataatttgggctatgggataaatcatgttatcttatccatttctcgtaagactttctcacacactcttaagaaaagaaaaaatatattttaaattccatggagtgtgaatattatttctgggttatcttaatttctaaataaaaatgctaggctcatgactttctgggaattgtcaaaaagaggagagagaagataaaattcagttttttgagaacatctatacaatgaagaaacaatcatcttaaaaagatatttgaaagtaaaatatagcaccaataacagacaaacagagagccaaatcatgagtgaactcccattcacaattgcttcaaagagaataaaatacctaggaatccaacttacaagggatgtgaaggacctcttcaaggagaactacaaaccactgctcaatgaaataaaagaggatacaaacaaatggcattcacagttgcttcaaagagaataaaatacctaggaatccaacttacaagggatgtgaaggacctcttcaaggagaactacaaaccactgctcaatgaaataaaagaggatacaaacaaatggaagaacattccatgctcatgggtaggaagaatcaatatattgtgaaaaggtaatttatagattcaatgccatccccatcaagctaccaatgactttcttcacagaattcgaaaaaactactttaaagttcatatggaaccaaaaaagagcccgcatcgccaagtcaatcctaagccaaaagaacaaagctggaggcatcatgctacctgacttcaaactatgctacaaggctacagtaaccaaaacagcatggtactggtaccaaaacagagaaatagaccaatggaacagaacagagccctcagaaataatgctgcatatctacaactatctgatctttgacaaacctgagaaaaacaagaaatggggaaaggattccctatttaataaatggtgctgggaaaactggctagccatatgtagaaagctgaaactggatcccttccttacaccttatacaaaaattaattcaagatggattaaagacttacatgttagtcttaaagcgataaaaaccctagaagaaaacttaggcaataccattcaggacataggcatgggcaaggacttcatgtctaaatcaccaaaagcaatggcaacaaaagccaaaattgagaaatgggatctaattaaactaaagagcttctgcacagcaaaagaaactaccatcagagtgaacaggcaacctatagaatgggagaaaatttttgcaatctactcatctgacaaagggctaatatccaaaatctacaatgaactcaaacaaatttacaagaaaaaaacgaacaaccccatcaaaaagtgggtgaaggatatgagcagacacttctcaaaagaagacacctatgcagccaaaaaacacatgaaaaaatgctcatcatcactggccatcagagaaatgcaaatcaaaaccacaatgagataccatctcacaccagttagaatggcgatcattaaaaagtcaggaaacaataggtgctggagaggatgtggagaaataggaatacttttacactgttggtgggactgtaaactagttcaaccactgtggaagtcagtgtggcgattcctcagggatctagaactagaaataccatttgacccagcaatcccattactgggtatatacgcaaaggattataaatcatgctgctataaagacacatgcacatgtatgtttatagcggcactattcacaatagcaaagacttggaaccaacctaaatgtccaacaacgatagaccggattaagaaaatgtggcacatacacagcatggaatactatgcagccataaaaaaggatgagttcatgtcctttgtagggacatgaatgaaactggaaaccatcattctcagcaaactatcgcaaggacaaaaaaccaaacaccgcatgttctcactcataggtgggaattgaacagtgagaacacatggacacaggaaggggaacatcacacactggggactgttgtggggtgggggaagtggggagggatagcattaggcgatatacctaatgctaaatgatgagttaatgggtgcagcacaccaacatggcacatgtatacatatgtaacaaacctgcacgttgtgcacatgtaccctaaaacttaaagtataataataataaaatttaaaaaaaatttaaataaaactgaaaaattcctagaaaaaaagtaaaatataatgtttttcatttcaaaaacctctattatccccattttatttaacccacttgactgaatgagacagaatcatctatcttcctataaatcattctgatatagaacctccatgtttggtggccttttagtacctgatgattgcctggtatttgggccattcaagctagactaatatgtgtaaacacaatttaaagtacaaattgagcaagtgtggttttggaaagagaatgagctttaagcactagggaactttgtataagtaaatcctggctaaactgctatttcttgaccctcctacattcattcagttaatttgttttcacacatatttgataacattaaaactaatcagagtaagtaagggtatgcataaggtttgtaaagataactatctatatgttattcacctctttcccccttttttgaaacttaactaaggacactattttcttttatcaacacttaaagttattataagtcttctatggccatagatatgaataattgcttttttttcaaaacaaaaaaggtaaattggttgaaaggaatattatcctcctattcctaaagtcactaccactcatagaggaaagaatgaaaatccatatcagccttattagatgactgagcttcctggatgcagtaactttgttatagaaatatgaagggggacccagagtccctcaaattggatgcaactcctgattcttttgtagcattcaagtaaaaatttttagagagttgaaatgcatcaaagtttgtgataactaagtaaatagttatattcttagctaatacataaagtatttttctttaatgagtcatatttacttctgtattcttacgatagtatgtccttaaaatttagctgggactgcaggaatagatgtttttctcccatttccatttgggtaacttaagctctgttgagaacttaacaaaactttagagtctaactaaaacaaagccaatatttaaatataacatagaaaaaataaatgtttgtacataatttctattgagtaattattgtacccactaaattttaagcaaagtggctggccacagtggctcatgcctgtaatccaagtactttggaaggccgaggcaggcagattacttgaggtcaggagttagagaccagtctggccaacatggtgaaaccctgtctctacttaaaaaaaacaaaaattagccggtgtggtagtgagtgggcacctgtaatcccagctactcaggaggctgaggcaggagaatcacttaagcccacgaagcagaggttgcagtgagccgagatcgcaccactgcactgcagcctgggcaacagagcgagactctgtctcaaaaaaaaaaaaattagcaaagtaacttctgatacttaaaagtatgctaaagcaataattttataaaaataattttacctgttattcttccaagttgaccatgaaatatctttccaacaaatccactgatatgagcccctaagctcacacctatgaaatgaaaattgtcaagagatgcaccatgcttctgcaattaaagagaaaggcaatattacagtattcatttcaagtaataacaaatcatgcccccctcatatatcgacatttcaaaattcattatttttctggcttgattcattttggggatatcgggaaagagactttataatttcaagatgactatatatttgttcaacttttgccacaaaatatttgatttttctttattcatttttaatatcaatttattttaaaattgtatcatctcatgcagaacagtatgcaaaatgcaattaattagcagagtgttttataataatcaacattactaggtgcttactttctgctagctacctcgatatgggccttacaaagttcatatttaatacttccaatttcgttatgagttattcatttttattctaatgcctaaaactgtcagtagcacctattaaatgctaaataaataatattggatcaattccaattttattaaggaaactgccagaagtaacaactttcccaaagccacatagattcataagaggaaaagatggattccaagctgctgtggtctgaatgtttgtgtctccctaaaattcatatgttggaattctaatccccaaggtgatgatatttggaggtgaggccttcttgtgggttaggagaattatgtcatgagtgtggaaccctcatgaaagggattactgcccagatagaagagacctgagggatctccttctactcttccaccatgtgaggacacagtgaaaaggcataatctatgaaccaggaattgggccctcaccagacactgaatctgctgatgccttctccttggacttctcagaccctgaaactatgagaaataaatgtttcttgtttataagctacctagcctatggtattttgttacagcagcccaaatggactaaaacacaaacctaggtctcactccaaaattatgctaatttgccttcttgttttatctgatcaggttgtgtcaaaaaccttaggaagattcacaaaagttcaataatgattctcacttcagagatgatgaaattaattttatggattttaggtgacttccttcccctgatcaccagctcaggagtgatgcatccaatcttccaaggccaacgtctgaatacctcttagtctcagctccaggaagggaaattagaagactacatgagagtgtacttccaccacactcttggggagctattgtgagacttgtggacagatcatggtccagcccacacagtgatatgtctgatggcttacagaaagatgtggagcgcttgccactaatgaaaaactaccctcaggctttcaaggcacaaggttatgattttcttcagatttctcacagccatgccccaaaacataagggagtatctctcgagactccagtgctgccggtcatttaaatcttcctctgtaatatgaagcctctgtaagcaaaggcactgttagaattttatctaatattacaaattttcctaaatatttctatttaatattcacattctccacactttgaggcacatatttattagttgagaaaacaccagtaacatcaggaaaaatcaatgatgtaattaatagtctgttggtggagatggttgaatcaattacctcctctgtctctctacagcaatggtattgttttgtccaaatttgggggtgtaaaaataataatgaaagttgatcttaatgattactaaatgtcacccactgattaagcacatatatattaattcaatattcatataaatatttttgtaacatgttgttattctatatgtacaaataaggaaatgcagcacagagaggctatgtaattgttcaaaattacacagatgataaaagatggacatacagtttgaacccatccagtctgacccctggccactacatataacggcttcttggaagtgttgttatttgttcaatttttagcagagtcttgaaagttcagcacaacacaactcaagtttaaatttcaagctcaataatgcccccgaatcagatatcacccttctttctctcaagtacccacaactacctactttcttttaggatagacatggatctccctaagggttgacttaataaacaaaaatcattcacagtgcagataacatagaactggactgaattttatttgatccattcaaatcctgagcagacttgaatgaatctgatgttcacctccaaagctgacagaagtatgctacttttcaaaatgattttttgcctgtaatcccagcactttgggaggccaaggtgggcagatcacctgaggtcaggagttcgagaccagcctggccaacatggtgaaacctcgtctctactaaaaatacaaaaattagctgggcattgtggtgggcaccagtaatcccagctactcgggtggctgatgcaggagtatcacttgaccctgggaggtgcaggctgcagtgagccaagatcgtgccactgtactccagcttgggcaacagagtgagaacctgtctcaaaaaaaaaaaaaaaaaaaaaaagatttttctttacttttaccaattcacactcgattatatgcaaatattttagccgtatattttaaaagatacctgaagattgtaataattataaagtttatttcccccacccacataggataactattttattctgaggttggtataggtagagttaaaagaaatctcagaagatttttaaataaaacctaataattactaaattttaatataatgttttaaaaataacacaggatatgtctaggtatagaattattcatttaggcagacaaagaaaagatggctgcatacattggtatatcaaaccagtaattgttaatgcttatggggaaaagtatatagtttattatcactttgtggtattgaatgtaacacactgcatattgtatagcacgtataatatattgtatagcatgtataatacataaaattcccagacttaccaaaagatttttaatgtgcacactcaaactcacagcaacttttctggtgtttttaactgctctattataaataaaagttgtagcaccccggctccagtctactacaattacattcatatcttcttcattcagcaaaatccttacgaagttctgaagccataatgggatggagcctactggtctgtatccgtgaataagccagactgttttcttttgtgtgttgaaattaacattaagtgagttattttgttcaaacagtggctcagcacagtttaggttgttccttgtatacatcatcagaatggtctctattctcggaataaataaatctctgaaggaatcctttacacttagctgagagaattcaaggcatggtcttttattatctgaaataagaaaatgtcagtcaagctgagtactgggatagtattttattcctgttgctattgcaaagaacagaattaaatgtggagggtagggaggatttcatttcatgagcccttcaacataatttactgagcaactgcaatgttgaaggtaatgtattaattatgtaaaaagattttctgaaccaaaagtaatggaaaatataaatgtgattggttaaaaaattaagaagagatttttatctgtacaaaatataatagtaatgggtgtgagcgaaaataagattgttaataaagtgcaatgggtactaatcaaagttgatacattgattataaactttaacaaaagttttacagagtagtccttgtacaataagcattagcataaaatatatttaacttgtctagtcatcaatacaaaacaataaagtaatattttccccataaaatttaaaatgtttcaaaaaattaaataataaatattaatataacatgaatgttgagatcataagttgatacaacattcctttgaaattttgcatgtgtgtgcttactgtacacataaacttaacaaatctttttcttaattttctttctaggacttacaaaccatttgtaataagtgtaaagactttaaccgctgggttatgtataatgggacaaaaatgtaaaacatcttaaatctcatccttatagtattttcatccatgtgtgcattctataactattaactatctatctatatattgctctatatacttatctatctaccctagaaagaactagggcagaaaataaataactaaaccagatgaatagcaatagtcattgctagacaatgaaatgatgactgccttttgttttctttttcacagatttttgtgattctatttttttcataataagcaaataatccccatagtggttttttttccagatgatagtatatgttcatactgcttctagcactttaatttgataataatattcaggaaataatttttcaatccataccaaaaattaacaaaagtattaatgcactttatgccagtaattccactttaaagaatctatcccagaaaaacatagcaaaacaagaggtaacgtattattttaatactgagataatatgcatttcttacaataattctagttttcaagtatatacacaatattgtcacaattgattagatgaagagaaataaggaaggcaatgaaggagaagcaagacttgcattccattcctatattaacagctgagagatatttggaaaaattatttcatttgttgtaaatatcagagaatgaggaagagaaatatattgaaacacaatacaatatgaatgcatgctacaccgtgcaaattgtgtgggaaatctatacatccaccttctcaccacctggaattctgacaagaatttaatacatatcaataccaatcaatacatccaaagtgctggtccactccaagctaaagtcaattttacctggccctagaataagtaatgaggaataaaccagtaggatcctggtgataaatacaagagaaagaaatcatcacctaatataatcaacaaatatatctattatctattaaaagatataaaatatttttcattagaatgcaagaaaaaatacatctcaaaaactggagcaggagtaaaaaatacaaaaattagccagacatggtggtgcatgcctgtaatcccagctactcaggaggccgaggcgggcggatcacgaggtcaggagatcgagaccatcccggctaaaacggtgaaaccccgtctctactaaaactacaaaaaatagccgggcgtagtggcgggcgcctgtagtcctagctacttgggaggctgaggcaggagaatggcgggaacccgggaggcggagcttgcagtgagccgagatcccgccactgcactccagcctgggcgacagagcaagactccgtctcaaaaaaaaaaaaaaaaagaaaatggaaatatataaagtagaaagaatgaaacaaaatgatgaaattacactagagaaaagaatatatatgatatgtgagcagttctgtaccctgcctattaaaaagcaaaaaataaaaataaactttttttaaaaagtaacaagatatttaaaggaggtacacaggcaattttaaataaatagagaactaagtatattctatacaaaataaaaagaaaataggttggtgtgttatagtgcaataatggcaccaattcaccactccctgaatccatctcatttctcttggaaattttagttacatcataagtggggtgacttgttccactccttgatatggacacaaatgtagggcgtgccctagaaaatagaaccttaggaaacttaatgcaagcagaggcttaaaatcagcttgtgtatgtgggcttggacgtcctaacctctgctatcaccacaaaagcatccatagtctggcctgttagaaaaggaaagacagttgtaacagtgcaaagtcctccaatgtgctaggttctagtcaccccagctgactgacagtcattcaatagccagacatgaattgaaccaagaaaaacagtgttacctaaccaactcccatatgactccacaagtgtgagtaacagctgcttaacatcaaatcccactgagggttaagagttttattttatttttattttattttggcattattgtgacatcatatagtcgatttcatcagcaacattaatatcaagtaaagagaataaaaacaaaagtcatcaaatgatacagtgggcacggtggctaacgcctgtaatctcaccactttgggaggccgagctgggtgggtcacctgagatcaggagttcgagataagcctggacaacatggtgaaacctcatttctactaaaaatacaaaaattagctgggtgtggttgtgggcgcctgtaatcccagctacttgggaggctgaggcaggagaatcacttgaacctgggaggtggaggctgcagtgaccgagttcacaccactgcactccagcctgggtaacagagcaagactctgtctcaaaacaaacaaagaaacaaacaacaacaacaaaaacagttatcaaatgacacacaaaaaagttaaactaatgtattgtcaaactcttaaggaacattaaattgattcaattctactagatttaggaatagaaagaaaaataaaattctagacaacaaaaacttacagaaatccctgatgagattataagtggactcttcagcagaaactttgcagggcagaaggcaatggaaagatatattttaaatgttgaaagaaaaactatcaacctagaattccatatccaacaaaattgtcctttaaaaatgaggaagaaattaaaacattccaacattcccacacaagcataagctgggaattccttacctccagacccactctacatgaaatgttaatgcaagtccttcacatttaaaagaaagtacactagacaagtaactagaagtcatacaaaaatacaaaaatataagtttctgtggtaaagacaaatatatgacaaataaaaacagttttgctttgtaactttactttttattttctacaggacttaaaagacaaatgaataaaaataattatgaatgcatgttaatgggtacacaatatataatgatgtaatttgtgtcatcggtaaaattaagtaggggagagtggaactgtaaagaagtagagaattttgttatggtattggagttaagttagtatcaattttaaaaagataatgattttgggctattatttgtaatcctcaatgtaatcaaaaagaaaacatctatagaatatttaagaaagaaaatgagaagagaatcaaaacacgctgctaccaaaaaaatcaattaaacacaaagaaaggcagtagtggaggaaatgagggacaaaaaggctttaagacatacagaaaactaataacaaagtggtaaaaataagtgctttgctatcaatgataattttaaatgtaggtagactaaacaacccccccaactgaaaacatattggcagaatgaataaaaatcaggaccagactatatgttacctacaagagactcagtttagatttaaagacatataggctgaaacttaaagaatgtaaaaagatattcaatgcaaaatgtaactaaaagtgagcagaaatgctgcactaacatcaagcaaattaactaagttaaaatctgttacaagagacaaatatattaaaatgctgaaacagtaaaaattcttagaagaaaacaagggggaaacattcataccttggatttggcattgatttcttgaatattacaagaacagaaccacaggcgacaacagaaaaaaaaaatgagtaaattggacttaatcaaaagtaaaacttttatgcatcaaaggacattatcaacaaagtaaaaaggcaacccactgaatgtgagaaaatatttattaatcatatatctgatatggattaattaattaatatcagaatattataatgaacttctatcactcaacaacaaaaacacaaacaacccaattaaaactgggcaaagacttaaattgacttatcaatgaagatatccaaaagttccataagcttatgaaaacaagctcaatatcactatcactaataattggggaaacagaaatcaaaagtataatgagatgccacttcctacctattatgatacttgctaaaaacacacacacacaaaaatggaaaataacaactgttggtgaggatgtacagaaattggaaccattgtgcattgctgatgggttataaaatggtgtagctgctgtggaaaatggtatggtggctcctcaaaaattgaaaataaacctaccatattatccagcaattccacttctgtatatacacccaaaagaattgaaaacagtaactggaaaatatatttgtatacccatgtttatagaagcattatttacaatagctaaaaggtggaagccacacaagtatccatcaacaggtgaatgaacaaaacctggtagatatctagaatggaatattgttcagctttgaaaaggtgaaattgacacatactacaataagaataactttgaagacattatgtcaagtgaaaataaactggacataaaaggacaaataccatatgattcaatttaaatgagataccgagatcagtcaaatttatagagacggaaagtaggattgtggttgccctgggctgagggaaaaggggaaatgaggagttatatttaatagatatagagttgatgggtacagaatttgagttttgaaagataaaaaattctggcgatggatgatgatcatggttgcatgacagtgtgcatgcagttaatgccactaacctataaacttaaaaatggctaaaataataattttttctgtgtgtttgacacaattgaaagaaaacaaaacaaaacattaagaatccaattcctgtcattatagatatctcatcccagatttgccttactgctgtaaacaaccagaacagtggataaactatatgggaaaaaaatttagacactggacaacaaaaaacacagaattgtgattgctgaaagggaagcaatgtatttgaaccctataaactcatagctttctgcttggaggccatttccagactgctgtgtaaaaagggctcaattaatcagagtatagcagtcttgtcaagtcggggagaaacatcagagtctgggaagtctgagacaactagaatttgaaaggcaaagtgtcagagaggaaggagccaggcagaagaaaaactctgaaatctgcataggggtctcttatatctggatgttgctggatccatatgttgctggatatgatcctttgcatacatgggatagaatcacaaagagctgaaagctgaacaattttcgaggtcacattagactaggagagattgaagttgcaactaggcaaagtaggaagaccttaataaatgcagggacattcagtaggatccccagaatggtcagactttagtttaaatggcactaaaccaagtctagaataaaagagaacttagagtcatcctccttctctcattctccaagctctgcttgctttcattcagcctcattatctggcaaaggacaggctatgcatataaaatatttaaggaaaacattaacaatcttggcataggcaaaggactctaagatacgatacacagtaaacatgaaacagaaaaaagtgataaattgggcttttacataataatacatatcttctaaaaggacactgttaagaatatgaatatgcagacttgtgtatctgaaaaatacttgtatctagactaacatgtatatgtattataataagaaaattcaatgtttcaatcggcaaaagaattaaagacattttacaaaagatggcataatgtctaagaagctcaagaaataatactcgacatcactagtcatcaaaacaatgtgaattaaaaccaaaataatataccactacatacccaggagaatggctaacattaaaaactgacaaaaccaatgaggatgtaaagcaactgaaacccttgaacattgctgggggaaatgacaaaatgatacaattattgttagtttcttataaggttacatgcacttatatgacccgaaaaattaacttgtggatgttaatgcatgagaaataaaaacatgtccttaccacatttacgagttcgtagcgttttttttttttacatgacaccaaattgtaaaaaaaaaaaacaaaacaagaagtatatgggtaaataaactgtggcatgtctgtgtaatttaatactacccagcaataaaaagaaataaactttttatgcatgcaaaaactttgatgaatcacaaaagcattatgctgagcaaaagactccagaaacaaaaaagtacatattttaaattttcatgtatatgaaattctataaaagaaatatttaatctagcgtcataaagaaggtctgggttatatcgaaccagaggtgtggaagggattaattgcaaaaagctaactaacttttaagggtgcaggaagtgttttatatcttgattttatggttgttatataagtgcacataagaagtatggtgcacctattttttcaaaactcattaggcttggtgcagtggctcacatctgtaatcccagaactctgggaggccaaggcaggagaatagctggaggctaggagttcaagacaagcctgagcaaggtagcaagatgatgtctttacaaaaaaaaagtaaaaatctaggtctggtagtgcacacctgtggtcctgcctactcaggaggctgaggtaggaggattgcttgaacccagaagatcaaggctgcagtgagccatggtagcaccactgcactccagcctgggcaacagaaggagaacctatctcaacaacaacaacaaaaaataatcaaagtacatttaaatgtgtgtacattttattgtatttatagtaaacatcaataaaattagttttaaaaaacatagtaaaggtccaatactttttaaataatagaaaaaatataaagttcaacaaataattcttaaaacctggaataaccctaatatcaaacataaagataggacaaatacacacacacacacacacacacatacaccagataaatgagatataagtcattgtaacccatacaacaatctaatggcaaaattcccaaatcacaaaaatacagagcataagaacaaaaaaataatttatactattttaaatataagttaaaatagaaatataatttattaaaataacagaatgcttttttattttatgccaattggaatcatcatactaatgataaaacactagggcatatttccattaaaattaagaaagtataaaaagtgctatcatactatgtattattttttaatattctaacttagcattaagatttgaaaagtaggaagctaaaaatcatgataaaatgttgcaggtgctgacaaacaaaatagccagtatagaggataatgtaactgactggctagagctgaaaaacacactacaagaatttcataatgcaatcacaggcattaatagcagaatagaccaagcagaggaaagaatctccgggttagattctttctgaaataagacaggcagacaagagtagagagaaaagaatgaaaaggaagaacaaaacctcagagaaatatgggattatgtaaagataccaaataaatctatgactcactggtgtacctgaaagagatgaggagaatagaacaaaattggaaaacatatttcaggatatcatccagaaaaatttccccaacctaccggagaggccaacattcaaattcaggaaatgcaaagaacctcagtaagatacttcacaagaagatcatccccaagacacataatcatcagattctccaaggttgaaatgaaaaaaaaaaatgttaaaggcagccagagagaaaaaccaggtcacctacaaaggggagccatcagactaacagagcacctttcagctgaaaccctacaagccagaacagattgggagccaatgttcaagattcttaaagaaaataaattccagtctagaatttcatatctgggcaaactaagcttcataagcaaaagagatataagatctttttcagacaagcaaaggctgagggaatttgttaccaccagacctgccttacaagagctctggaagaaagcactagatatggaaaggaaagatctttaccagccattacaaaaatatactgaagtacacgaccagtgacactataaagcaaccacataagcaagtctgcaaaataaccagccaacatcatgaggacaggataaaatccacatatatcaatactaaccttaaatgtcaatgggataaatgccccaattgaaagacacagagtggcaaactggataaagtgccaagacccatttgtatgctgtcttcaaaagacccatctcacatgcaatgacaaacatgggctcaaaataaagggatggagaagaatctaccaagcaaacataaaacagaaaaaaaataggggttgcaatcctagtttctgacaaaacagattttaaaccaacaaagattaaaaaaagacaaaacattacataatggtaaagggttccattcaacaagaaaatctaaccatcctaaatatatatgtacccaacacaggagcacccagatttgtaaagcatgctctttctcagagatcttcaaagagactcagaatcccacacaataataatgggagacttcaacaacccactgataatatgagatacattattgagacagaaaattaataaagatatttaggatcagaactcagcactgggtcaaatggacctgatagatatctccacataaaacaatagaatacacatttttttcaaggccacatggcaaatagtctaaaatcagacacataattgaaagtaaaacactcctcagcaaaacaaaagaaatgaaatcataacaaaaagtctctcataccacagtgtaatcaaattagaaattaacactaagaaattcactcaaaatgatacaattacatgaaatagaatagcctactcctaagtgaatactgggtaaaattaaggtttcaagaaattatttgaaactaatgagaacaaagatgcaacataccagaatctttgggacacagctaaggcagtgataagagagaaattgatagcactaaatgaccacatcaaaaagttagaaagatctcaagttaacaatctaacatcacaactaaaagaactagggaaccaagaacaaacaaatcacaaactagcagagacaacaaataaccaaaatcagagctgaactgacggagactgagaaatgaaaaactattcaagagatcaatgaatctaggaggtggttttctgcaaaaaaaaatacaataaatagactgctagctagactaataaagaagaaaaggaggagagtcaaataaacggaatcagtaacaagggttatattactacttaacccacagaaacacaaccaccagagaatattatggacacttctatgcatatcaaccagaaaatctagaagaaattgataaattcctggacaaatacatcctcccaagacagacttcaggaagaattggaatccctgaacataccagtgatgagctctgaaatttaggaataaatagcctaccaaccaaaaaaaaaaagcctaagaaaagtctgggaccacatgtattcacagctgaattctactagatataaaagaagagctggtaccattcctactgaaactgttccagaaaaaatgaggaggagggactcctccctaaatcattctatgaagccatcatcatcctgataccaaaatctggcagagatttaacaacaccacaaaaaacttcaggccaatatcattgatgaatatcaatgcaaaaatcctcaacaaaatactggaaaactgaatccagtagcacatcaaaaagcttatccaccatgatcaagtaggctttatccctgagatggaaggttggttcaacatacacaaatcaataaatgtgattcatcacataaacagaactaaagacaaaaaccacatgattatctcaatagatgcagaaaaggccttcagtaaaattcaacatcgcttcatgctaaaaactctcaataaactatgtattgaaggaacatgcctcaagataataagagccatatatgacaaacccacagccaacatcatactaaatgtgtaaaagctgaaagcattccccttgaaaaccagccaagacaaggataccctctctcaccactcctgttcaacatagtattggtcctgaccagggcaatcaggcaagatttgaaagaaataaaaggcatccaaatagggagagaggaagatgaactaccactgtttgcagacaacatgatcctatctctagaaaaccctatagtctctgcccaaatgcctcttaaattgataaagaagaacttcagcaaagtcttaggatacaaaatcaatgtgcaaaaatcactattattcctatacaccaacaaagtcaagcctagagccaaatcaggaattaactctcattcacaattgccacaaaaagaataaaatacctaggaatacatctaactaactagggtagtgaaaggtctctactaggagaacaacaaaacactgcccagataaatcagagatggcacacaaaaataatcgaaaaacataccatgctcatggatagaaagaatcagtatcattaaaatgaccatactgcccaaagcaatttatagattcaatgtgattcctattaaactaccattgagagtattcacagaatgagaaaaaaaaaactattttaaaattcacatggaaccaaaaaagggcccaaatagccaaggcaatcctaagcacaaagaacaaggctggaggcatcacactacctgacttcaaactatactacagggctacaataaccaaaacagcatgatcctagtacaaaagcagacacataaaccagtggaacagagtagagaacccagacataatgctgcacacctacaactagctgatcttcaacaaacctgccaaaaacaatggaaaggattccctgtcgaataagtggtgctgggataactgactagccatatgaagaagattgaaactggactccttccttacatcatatacaaaaattaactgaagagggattaaaaacataaaatgtaaaacccaacactacaaaagccctgaaagacaacttaggcaataccattcagaacatagacacaggctaagatttcacgacaaagacaccaaacgcaattgcaactaaaacaaaaattaacaagtgggatctaattaaactaaagagcttctgcacaacaaaagtaactatcaacagactaaacaacctacagaatgggagaaaatttttgcaaactatgcatccaacaaaggtctaatatccagaatctataaatctataaggaacttaaacaaatttacaagaataaaaactaacaactccattaaatagtgggcaaatgacatgagcacatcaagaagcttatccaccatgatcaagtgggcttcatccctggcatgcaaggctggttcaacatacgcaaatcaataaaagtaatccagcatataaacagaaccaacgacaaaaaccatatgattatctcagtagatgcagaaaaggcctttgacaaaattcaacaacccttcatgctaaaaactctcaataaattaggtattgatgggacgtatctcaaaataataagagctatctatgacaagcccacagccaatatcatagtgagtgggcaaaaactggaagcattccctttgaaaactggcacaagacagggatgccctctctcaccaatcctattcaacatagtgttggaagttctggccagggcaatcaggctggagaaggaaatacagggtattcaattaggaaaagaggaagtcaaattgtccctgtttgcagatgacgtgattgtatatctagaaaaccccattgtctcagcccaaaatctccttaagctgataggcaacttcagcaaagtctcaggatacaaaatcaatgtgcaaaaatcacaagcattcttatacaccaataacagacaaacagagaggcaaatcatgaactcccattcacaattgcttcaaagagaataaaatgcctaggaatccaacttacaagggatgtgaaggacctcttcaagaagaactacaaaccactgctcaatgaaataaaagaggatacaaacaaatggaagaatattccatgctcatgggtaggaagaatcaatatcgtgaaaatggccatactgcccaaggtaatttatagattcaatgccatccccatcaagctaccaatgactttcttcacagaattcgaaaaaactattttaaagttcatatggaaccaataaagagcccacattgccaagtcaatcctaagccaaaagaacaaagctggaggcatcatgctacctgacttcaaactatactacaaggctacagtatccaaaacagcatggtactggtaccaaaacagagatatagatcaatggaacagaacagagccctcagaaataatgccgcatatctacaaccatctgatctttgacaaacctgagaaaaacaagaaatggggaaaggattccctatttaataaatggtgctgggaaaactggctagccatatgtagaaagctgaaactggatcccttcctcaccccttatacaaaaattaattcaagatggattaaagacttaaatgttagacctaaaaccataaaaaccctagaagaaaacctaggccataccattcaggacataggcatgggcaaggacctcatgtctaaaacaccaaaagcaatggcaacaaaagccaaaactgacaaatgggatctaattaaactaaagagcttctgcacagcaaaaaaaactaccatcagagtgaacaggcaacctacagaatgggagaaaatttttgcaatctacccatctgacaaagggctaatatccagaatctacaatgaattcaaacaaatttacaagaaaaaaacaaacaaacccatcaaaaagtgggcgaaggatatgaacagacacttctcaaaagaagacatttatgcagccaaaagacacatgaaaaaatgctcgtcatcactggccatcagagaaatgcaaatcaaaaccacaatgagatactatctcacaccagctagaatggtgatcattaaaaagtcaggaaacaacaggtgctggagaggatgtggagaaataggaacacttttacactgttggtgggactgtaaactagttcaaccattgtggaagtcagtgtggcgattcctcagggatctagaactagaaataccatttgacccagcaatcccattactgggtatatacccaaaggattataaatcatgctgctataaagatacatacacacttacgtttattgcagcactattcacaatagcaaagacttggaaccaacccaaatgtccatcaatgatagactggattaagaaaatgtggcacatatacaccatggaatactatgcagccataaaaaaggatgagttcatgtcctttgtagggacatggatgaagctggaaaccatcattcacagcaaactatcacaaggacaaaaaaccaaacaccgcatgttctcactcataggtgggaattgaacaatgagaacacatggacacaggaaggtgaacatcacacactggggcctgttgtggggtgtgggtaggggggagggatagcattaggagatatacctaatgttacatgatatttaatgtaacattaatgttaatgggtgcagcacaccaacatggcacatgtatacatatgtaactaacctgcacgttgtgcacatgtaccctaaaacttaaaatataataaaaagagaaagaaagaaaatgtggtacatatacaccatggaatactatgcagccttaaaaatgaatgagatcatagccttcacagggacacgaatggagctaaaggccattatccttagcaaattaacacagaaacagaaaaccaaatgccacatgttctcacttctaagtgggagctaaatgctgaaatcacatggacacatgggggagaacaacacacactgggccctgtttgtgggggttatggggagcgagagcatcaggaagaatatctaatggatgctaggcttaatatgtgtactggtataaataaatgtagtggtatttaattcaaaaattttcagttatatgatataatcaattactattttttgaaggatgagtgggtttaagccggtttaaactaggttcctatgatttgcaaattagtcttttttttaaaaaagaggtagaagggtttgggaggagagagagaaaagaaggaaaagaaaacagaaagaagaggaaaagagaaaagaggaaaaaatgaaaaaagaaatttttaaaaatacagtactgaaatacaccatgattgaatataagcattaatatcatgaagtaaattctgctcaaattaatttatatgtgcagtgcaattctaaaataatctcaatacaataactaaggagaggcagaaactgtataagaaaaataaatgacattttgaagataataggaccatgattaaaattatgttcacataataaaccaattaaaaagaggcctgtgaaacagaaccaaaaatagtttaatgaaatagaatggggacacccataaatatatcattttaactataataattatggcaattaaaagcagtcaaaggtgatggatttttaaataaacaatgctaggataattatttgattctagttatattaaagtattccatgtaaaagtaaaatcatatgaactagaagaaggacacagttaatatatatatgatctcagattgaagaataatttttcagcataaaaacaaaggaagaaaccaggaagccaatagatttcatagcacatacatttaaaacatctgtacataaagaaacactataaactagacaaaagacaaaaaatgaactacggaagtgttttcaatataaggtaggaaaggaactaatatatatatacaaaaccataaatgagaaaaaagaaaaagaatactatagttgaacaccaggtaagggatataaacagatattttctaaaaatattcaaagagttcataaatgtattaaacatatgcttagtctccttaaaaaatcaataaattttaattaaaataaaattaccatatcatttttacctttatactcattgactactaacatcaatgtatattgcaacatttcaatacagaatatttaggattcaattaaatacatggaaattatagactggaaaaataaattatcatgtatttctaagatggggactatgcagcatttaagaaattatgtttctgaaaactaaggataacatcagaaagcacgtattatgtaaaatgaaatacaataagataataaaaaccatacacatgaaccatatgaatatatatttctgcatatatagcccatatttatatagtactcattttatccatgatatagcgtatatataatacactgtaaacacatgtatatatttgtgcacatacctccccccacacacacatctttattgggtaagatattaaccaacacaaatgtagtttgcagtgatgctgattaaattgtgttctcagtttatctgtatttctctgtgtgatttctattgtctgtattttaatatttttagtttcctatgtctaaaatattcatttcttagtttaatgagaaaaaatagatttaatagacttcagttaattaagaataaaaattgccaaaatgaatggtatcagcaaaaactgaatatatctaaaacagaaagattagtattaatttttgtacctgtttgaaaaattaacaaattgaggatctgagaaatagactaagtaactctattgtgattcaaaattcactagcaggtacataatatagaattttatttccaaagatgtaggaagataatgactctagcagtaatctcaacagagaggtaagctgagaaataatactgaaaatcttattaggtttcaaattatagaagcagcaaaaatgttaaaaataccaaagacacatggggaagttataaataatcattgtaggttgtccagcattctctctgaaacatatttccattacagttacaatgcctgtgaaattgagagcaaggagattaaaacagacagtccagaggcaggcatagtgccctggacgtgagcagctgagactcaagtacctctagcctctctcaaacatctcttgtgactctgagcaagttattttacctctcatctctgagtctcagtttcctcatgtttaaatggaaggagttgaaagaaatggtctcctgttactgtaacattctttgatttcaaatgctttttcatgctgggcaagctgctgagataagtttgtcttgcaattttcagtgttttcattattgattttatggtgtataaagataacttagtttgtaatcaaaatgaacaaaagaaccactagttttgctgactcaagaacagagagccttaaaacttagccataaaaagctacaatcctcacacatcttagaaagatttaaccctttttttttctgataatctaaacccccattctcatcccaaaaatcctacatgaaaacctccttcattctctttcctcatttctggaaaaaaaacggatttgttaacaacaacaatattaaccacatgataatagtttatattcagctatcacttcatggcaagcccagtgttgttttatatttcctcttcttttcttcattttatatatgaagaaagtgaagttaaaagagattacctgatctcaggcacacaactagaagccacaggacatttctgggtgagaactgaaaagcatgagcactatatttttggcacaagttattatgtaaacatttgagcaacataaataagaccctatcagaagttcactagctctttgtttattcatgtataataagaaggaagacccttttgggccagcagaattccaagtacgaaacaattgacccactttatgctacgaagacagtggcttctatggccacagagccagttaagacacaacactgtaggtaaaatgttaaaatccctgaatgctagtggcagaaagcaaaataaaaggcaaatatagctttaattatgtagttgtgaagcaatcaaaacacacatttagaaagaatacaaaattatagctagataggagaaataagttctagtgttctacatcagcgtagaatgactatagttaacaataatacatagtttcaaatagctaggaggatattgagtgttcccaacataaagaaatggtaactgtttgagatatcaatacactaattactttgatatgatcactatgcattatatctatcaaaatattactatgtactctagaaataataggcacaactatgtcaattaattttttaatgaaaaaacaagatagtcagcaactcatttatgcaaatgttaggaaagctgctgaaaatgaatctgactacacaagcaaaataaagtaggtgtctaacaagtctttataccaggaattcccaagaatgatcttaaaaatggatgtaaaaaaaaatgactgggtacatcagaattttcagaatgtaatttcctggggccaaccccagagattctgatttggtagatatatctgcatttttttaagtgggtaacccagagaattctcatatggtagttcatgaagcacacacggagaagttttacatctggaaattatctaaaagaattaaagagaaaatgaacacggaaaaaaacacagtggattattctaacctaatttatattgctttctacgtgaccaaatcaacatttatgttaccttctttgagcttcacaatagagtgagatagtattacagctattaactgcatgtagagggttaagtgacttggcacaagatgacatgccaccaggacatgaatctgggtcttttagttccaaatttcattttctttcacatgatccttgtttaaagagattttggtacaataaattaaaattccttgagggcatctgattttagtaagtcaagaaaaattaatcgtggatcatatcagaaaaatactgacacaatttagagaaaaataatgattttgttgaggcactcagctcagaatcccatgggttctggaaagattactgccctacaaacaggcttctaaggttctgtaacttcctatacccttattactccaaggtggtctgcgtacccgtaggcatcacctgagtgcttagtagaattgctaatcttgggcttcacctccagcctatggataagaattcgcatttttatcacatactacaagttctgtgactttacaaaaataacttcattttattctgtttttcactttcctcaactgtgaaatgagaaagctgaattattctacctttaacatctcttccaaagcacacaggagtgggaaactatgtcctgtggtcaagtctggttggcaagctaagaatgttttttacatgtttaaatggttgggaaaaaatcaaaattataatatttggtgacatgaaagttacaacaaattcaaatgtgagtgtccataaataaagttgtattcgtgcacgtgcacatgcacatttacttgtttatgcattatctactgctgctttcttgctttggtaacaaagctgagtaggtgcaaaagagactgtatggcccacaaaacgtaaaatatttactatctggtcgtttacaaaaatatttcctggctggctcagtggctcatgcctgtaatcccagcactttgggaggctgagaagggcagatcacttgagcccaagagttggagaccagcctgggtaacatagtgaaacgctgtctctccaaaaattacaaaattagccaggcgtggtggtgtgtgcctgcagccccagctaccctgcaagctgaagccagaggatttcttgaacctaggaggtcgaggctgtagtgagccatgaacttcacactgtactccagcctgggtgacagaatgagaccctgtccaaagaaaaaaagaatttctgacccttgcaatataataacagcaacaacaaaaatttcagtgtaaatggttacaataagttggtaactgtactaagaataaatatgcatatatgcatataatttgaatatacagatacatagatgtactgtatatctgtataaagttttttgatctatctctcctctcccattttattctacttacaatttttaaaaacacctgactaaactgcttttcggaatgtcgtttctttattaaaggcagatttaatcaatgattttcatgttgacaaccatgaaacatgccctccttgaggtatatatcagaatctctagtggagaagaaaggagcatgtgtaataaataaaacacacttgtatgaaataaactactggaaatcaacaaaattttttaatcaagtagagattcaaggaaaatgagagaatgcatagagtctacatgggttaaaaatgaatttgaggatcagtaaaatttgtaattcacttattttctatttactactgttaatatctaaaagttctactattgtattttaatcatcattacacaagaattagcagacagaaacatacaaagcaattatgtttgaattttcccaactgaaaatttaggcaactgactaaataaatactaatcaaaacaataatatcagaaagtctgtcaaataagtttttaatgtaaactatgatattaaaatgattataactgtattaaaaatgacacataagattaggggcctagacttcaaatttctctggctttcaactgaaggtgccactattttacattataataacataaaatccctatcaagaaacttaagagtaataatataaattataaactacatatcagtatcatttagtttctatatttaaatataaaattcaaacatttccagaatttatggttatctcaaatagccaattgaaaacataagaaataatggtaatttctagttaattttaaagttattcaagtatgcattaacaaatttcaaataaatttaaaacataaaggaaataatctgctctcataaaacccctacagaaaactatcatcttgaattttaaatttgccactgttattaccataaagtagaactaattgttctacttataagtcgaacaagtaattctactttctcataaagtagaaaacgatactcttaatattgataaactttattactgtacgccaataaaccagaataaagttctaccttattaccataaaccagctttgtttttcgtcatactgaatgagagcaaaagttgtagtatctggttattttgtttgttttgcaatcgataatttatccaagtaagaattttcttcaaaagtagagctagttaaacaaataaaattgaaacaagatatttaaggcataattttaaataccaaattaatttctccattactgaatttttttctcttgagtatttctatttattctctagttacatctttttttaaaaaaaggttttctagttactaattatctggcaaggaaataaaatgcaaaatgtcaacttattaaacaaacacatgcacacacacacgtacacacacagaagttttcttaatagtaatgtttgttataattagtaccaataatctaacatatttttatcccattatatcataacattctttatcccagaatacagaccacactattttatatgcaatttttaaagataaatcaaattattaattaatatcttaccagatctcacccagcacatcaaacaaagaaaaatgtatactctcatttggaatctgagaaaagcaaaaacagcactcaattcaccaaaaaggaaattccgtaactcattgaggtttctctttggtaggatcatcacaggctggcaggttcttctgtaaaagttcactgatttttgctcctccctcttggttgaaaaggtgaggtagtttgttttctcccactttagcttgtggttgtgggaaggatttttaagtcacaggctctgtaataagtcacaaacaaaccttcagctacacaagttgaatttaagggaatgataaatctaattacatctttctgtattccttttaacctcaggatttcagaagcggtcaggaaaatatgcaaatgtgatgttagaaaatgctagaaatggaaagagtcagaaaaagttgtggtttatattcactttgactacaaactaagatatctttatataccataaatcaataatgaaagccatatccattaagctctttcaagtataaaagatgagcttttcatatttatgttattttacatccccaaagcaggggctattttaacattcaaaattttggctcatcacttgaggctaaaaggtgaaaattataaaaaaaaaagtatttaatatgatgaccattttaaaattagcatacattttctttttacatgtttacttaattatcttcttttcttagcaatggactttagtaagcaagaaaaattgggagttgttctaagtacataaattgaaagtttaaaaattaattcatttttaaaaaattcaagtttctctaaagttccaaaaatacagtaagaacagaagtgttttttgtatgttataaatctgcagaaactaatctgaggtctggggaagtatttgagaaaattcacaaacaaaatgaagtattagtttaaaaaaatcacaaacatttaactgctgaggaagttccatcattattttgaactgtctgatctctgggtgttttacatgagatttccattttttaaaaaataccaccactacaatttgtttgaagaccaaaaataatctaggtccttccacagcacttagctgtaagaactgcacctctctaacaaagatataaataagccacatcatttcagaatatgggaagaaagataatgtgtcatacatcctagaacaaatttttcctaacaaattttacttaataaattaaaatacaaatctttcctccttcacttataatttccttttctctttgtgctttcaatgtggcattataatatgactcttgcacatttactttcatctttatgagttcatactgaaaaatactggcatatcaggcagtataatatagagtttcaaaattaaaaatcatgcttcttcattatcatgtattttgcctactgccaatatgagaaagatgaggttattaatgttcattgcattaaataggaaaatattgggggatgacaaagttacaaaatgccaatagtttagtaagacaatctatttgagcacttgtttagtcctccttggatataaaaaatgattgtaagtagcttacatacacacttacaatgtaaacattaactcaaaggggatgttcatgatgatgatgtgatgatgatgatgaagatttaaaatttattgagccctatgtatcaggcgttcttcaagcactttacaagtgagttaattagtgtttgagatggaaaatcattgtttatcacaatatattttgtcacaaccttttattaatttgtcaatgtgtcaaaatgtttaacaatcttaccctttgactcagcaattaagcaacaaagatacttcctacagaaatccaagacactttcctacagacacatccaaggtccttttatgtggcaaatggcctacatgtgcacaaatatatgagcaaagacattcatctcaccattccaataacagtcaaaaaatgaaagcaatataaaatctaacaatgagagattagtctaattaggtatctactgtggattaaaactaatgatacagattgatcagtatttattggtgtaaaaggccttcattacacctttttcattacaaaaagttttagagggcagagggcaagctaaaaaacagtattatatagcatgctttattttcctaaagtgtgatatatataaatatatatatatattttcctaaagtgtgatatatatatatttcaaagtctggaaggttttcctccaaaatagttatctctgcatgataaatttgtcagtaatttttactttatttccttaaattttaacaatatttatttataataaacatctaatacacataaaacaattgaaaaactgtatttacttgacaaaaatatggttcagaaaaaatcagaataaagacaaaataagtgtttaaaaaagtgaagacaaaaatgagttcaatttaaaaaagcatccaataaaatcccttaatagtagttggccaacctcctttccttccttccttccttccttccttccttccttccttccttccttctgtttcagttgttcattcacttatgcaacttttattaagtacctattgatttccaggcacagactttgttgttggggatacaaagtaaagacattaatttatttaatctgtattctttcaatagctatttattatacacctacaggtgtgtcaaagattgtcttaggtactgaaatatatttactctatactagttcccagtgagaaggacttgacagaagtgtacctagggaactatggaagcacacaagtggagtggccagctaatttggaaggcagagttcagagaagcattgcaggacatgttgcctgggcttaactacaaaagagagtaagagttggctgcacagggccgggcacagtggctcacgcctataatcccagtactttgagaggccaaggcgggtagatcacctgaggtcaggagtttgagaccatcctggccaacatggtgaaaccctgtctctactaaaagtacaaaaattagccgggcatggtggcacacacctgtaattccagctactcagaggctgaggcaggagaattgcttgaatctgggaggcggaggttgcagtgagccgagattgggccattgcactccagcctgggcgacaagaacaaaactccatctcaaaaaaaaaaaagttggctgggcaaaagaagataaagaaatgagctctaattatacatatatagacatacagaggtatacatgtatatatacatatattttcatttattatatgttcattcagctagggacatcagacatcctgatataaatgaagaaaggctagctctttatagagtgttacatgtatttaacccattaaaacctgatatatgactaatggtacagtaaatactgaaagtgaagtgaattatttttaacctactactagatttattaccatgcatgcattcaatatgagttaagaaacagaacatgcttacattagaaaaatgatatattgagatcatattctgaaaaaattgctaactacagaagctgactttcagagtttataatattaactaagtattctagaattataagcactataaacttatgtacggccagaagaggatattataacaccaaaattatgcacatttgtagacaaagaaggatgcaaatttcaatagaacaatataatatgaacattaattacaagtgtagttaaaggtttgtagcatacgcactcatatacatgcaatggtttaaactgaaacctgaagatacagcttgcatataagaagtgtctgaggggaattcaaggaggaaatatgttgctttgatgagatttatgaagtaaatgaatacaaataaatcaagaggtctacacataacagagacttgcaagtatccattcatttgatcaacatatatttatttgcctacaatatgagtgtttccttaactccttcttactgtaccgcaactctactgatgatagaggaaagaaaaaggaaaaaaaaaaatggagacaggacttatatcagttgaaggtaactactgaagttactagcatttatattatatttgtgagggtagaaaggctgtctctcccaaagtataagctttaggaggtcagacttttatatttccctttgttttccaagaattaagcattcagaaaatacctattaaatgaagtaactatatttagtccaatccattccttaagaaacagaatccgaattccaaagagaaattacttgttcaaagtaataaaactatgtaatgtcagagatcaattagaaattaggatttcctaaaatgtgtaccttttcattagaaaagatgactttttttggtccatcaaccagataaaagcatgcttcctcaattcaaaatgaaattttatcacgatgccaaactaaaggtcaaataatgttctgatcacctatatgatattcatgagatgatctcaaggtcctatgtagacgtatggtagcttcagaaaggaagccaagttaacagttgacagctgatttatcaaagtattgagattctaagttttctttctcctttcttgtaattttattgttcataagacttttattaaaaacaaaaattatccccaagaaagaactaagcctttagcctggtacaccatatacaaagtatagccctgaaacaaagtacagccgttggatcctgacacaaaccctagctgccatcctcaaaaattctggcttagacacaaaactggctcactctcaccagtatatcccttggtatttgctttctcaagttccttttggagtccacttaaaacctctgcgaccagtttcaaaaactcatctagggagcactttctaggaaaataaactttaattctagttttctgttgtatccacatccatgcaaacatcgattctttcaaaaattatttatagtttaatatcttcatgatttgttcatttattctttggacccaaagaaatgtatctccccgcatttgcctgggagcttctgcaatgaagttaccacaatttaaatcatctctacagtgactttatttaaaatgttgattgaataaatccaaaatcaattaatgtgccagaaaaaaaggaagccaccccactagctaaagagtaaagccctttctgcattcatctttcttactctcacccactctcccaccgcccagccctacgccaggcgagggagcagtgcggtgggcggtaccccaagtccgctgggggcgtggccctggagccatgcctcgcccccagcgcgcgctcccggcgccggccccgccccctcacccaggcggcgccgtaaagccggagaaggggcggggtctcagctcctacttcattctacggccgagaccggaggatgttccctgctcaggaggaggccgacaggaccgtgtttgttgggaatttagaggcccgagttcgggaagagattctgtacgagctgttccttcaggtaccgtctctgggaaggggcggcggaggggcggagcacgtcgggccggaaacatagcgcgcacctggaccacccggagcccggcccccttccgtcccatcctgagcaggggttttaatttcgtttcctcttggcgcacctgtctccaggtgagcggctggggagtgaaatgagggcgcgttccccatccccatccgcgctgcagagtcctggggttgggcagggacgtggttccttcaacccccgtttctgattaagggcttcccagaggctgcctgggcctcgggtgtgcgcgggcagaaccgaaaacagcctggtcactgttctccgtcaagtagtaagcacgcctgacatcccccaaaaggagaggggtcgcttttataatgtttccttttacaccttgctccttccttcaagcccttttatgcggacagtatttttattccagcatgaaaagtgagatttgagatgatttggcagccaacttaccgtgactgtgaccaggtgattccctggacaaggccctttaattcataccaagaggaccttcggaaactttgagatctggtacctctaggattaagcctgctgtgtcctgtatacacgctcacttatcgtattgtcctatacagctaggtatcacttgccaaaaagatacactcattcagccattcccctaaccgtgtaatgatccggaattacggggcaaatactgagggtgctgggaaaacaaattgacgagacatccttttatcttcctaacagggagaacttaaaattacaatgtttacgataatctataaaaagagaagggacatagatagaaaagtggttccgcgtgcgaactctgaggtcagcagtgtgactctgagcctgtcaatgaattcctcagtgcttcagtttccttatatgtcaaaagagagtagtagtatctgcagtataatgtggctatcggaatatgtggcctaatggtaaaatggctacagctgagtctagcactcgctgtttgctaccgctactactgctaatggtactgctgttattattagtaataatactaacatcaagagaaatcaatagttactttctcctatcagaataagggaaagttccgagggaggcaattacagaactaaattttcaggattgaatgggtcaaaggggtcctttatttggttgtgaaaggacttacttttgtctcgaaacttaactaaagcaaccctcttttaattgtagatacaatttggtagagagggttctttccaggaatacagtttcctttcctggacgtaaaacttttttattatttgaaaaatattattgattttaagacttttaggttcatccttttaattcatctttttaaacttgcctccttttttatgaactctaatccatatctgttttttcattcagtatcatttaaaacttactatattaagttaaaaaaaacaacaacaaaaaccgaaagaaatataaagtaaacttagagttatttttctccagaagacttctttcactttgagcctccaaaaaaaggagagtggaagactggggtgggattgcattatccaataaccattatttttagtcaatcaggactcgatcaatatcagttgtgtggatccacaagactatatattatcttctcattctttatcagttccttcttccacctaagcaaaatataaattttatttaatagatcaggtaagaagcataagttcttatttttgtctaggtattgaaaggaattgccaaagtggagtttctcttccactttagacttcaacacccagcaaaacttgacaactatcacactatgtatttcattgtgatttaaaaaatactgtaagatagtgtgattgttgctaaaagtaagtcttcatgttgacttttatctttacaaatgctttgaatatctaaatttatgtcaaaattcaaatcacgtaagcatgttctgtcccatagtgattacatctatttaatatctgtataaaaatcaccaattttattggtttttatattacagtatatttatccttttactattttctttcaaatttctgattatacttggaaatgagaaaatcagatttattatcattacacttttaatactagagttgagatttagagaaaatatggtgaattcagtttcaaatatgttgagattgaagtacaaaaacatagacatctccaggaggtgtctccatgaaagagacatggtgggaaaagtaaatttgttgatgaggtggtccttgaagccagaagggaagggaagctagtccctgggagagcacagagaatgaaaggaaaagactaaatcttaacacacagaattattttaaagatgatcattaatatttttctttagagtaaaagcaatttttttatttatgcaactctacagggaaaaataatcagttattaaagtctgaaccattcagcattaaatcagttgtttgtgtttgtaagtgcctcctccaatcattatcatggctgtgatgtaatttttcgttagttgtaattaacaatcttctatgatatttggctctgtgtttttaaatcttcattgcatattataggtttttctatcaatataatctgaatatttataatttatattttattccgttttagtaacacaccatggaataatatctccagttgttagatttagagcctctctaatttctcacacttataaacaatgcaatatacttaaaagtcttgaacatatttaaacatttttcctttggaaatttaccagatggagtttccaaatcaaaatgcatgataaatttatttattcttgaaaagatatttaatcttcatgacagaaaatttaaactatgatataacatcgccagcttttttgaggataactcaaccagcattgaatttctcatttcagttattttttgaattcaacactgtgaatgtgtatggagacaaagtagtattttaatcttagatttatatgttttctaaattggtttgttaagcctaacagaaggatagtctaccatttcttttacagtttgaaactaatacctagaatttcctgttcttaacaccatgtatgtttccccaatgagccagaaaatacaaagaaagtgtgaggaagtgtaatatttattattagaaagatacattattagcagagctacataaagatattgctaacacatttctttagtctaaagttgaatttacttatttgagtataaaaaaaatctttggatttatgagaaaataatttttaagtttcttataggcggggccactaaccaaagtgactatatgcaaagacagagaaggaaagccaaagtcttttggatttgtctgctttaaacacccagaatcggtgtcttatgccatagctttgctgaatggaattcgtttatatggaagaccaattaacgtgcagtatcgatttggtaggtcctgtcactgattaatcttcaaagtgttttgtggttggtactattctcagagttgtaagcaatttgtttcctatgtagtataagaccaaaacaaaaaaaagtaccttctaccttctggtcattgttaaattttctcagaacacgtgtctaattcataatgttatatagttaattagtcttgacaaacctatagcatcttttctaaaaataaaatgtaagataatcgttttagtatcagccagcaagtagctatgatggttgctattggcccttataaattgagcaaatctaaatgaactggggtcacacaactgtaacatttatatagcaagggtatttactaatcttgttactgctgatgtatggtactgaatctgtactatttggaagatagagagagggcatttagtccttctggggaaatctttctatacatgttgcacaggattttagcccctgtaagagcaaagtggtgaaaggcaacgtagagttacccttagtagtggcggaaaaaacttcctgacaagaatggcctcaacaacttctcctgcacgcatatcaggaacagatcattcatgattagctgccaagagaatgttataccattactctagctctttcatgtttcaggagactaatagaggccatctggtaattcttgcaatatgtacgcagcctcctctaagtggtcaggcttattggtctgtcacttgtcggtttttaaattcctcttgctatactaaaagcaaacaaatactaataacaaaaacaatgctttattgcaaagcaaaagtgcgtctctttgcatttctttttttcttcctttcttttgtaatacatggttgcatcatgctctctggtactttctggttaacttacacaacctggtattaggttagtgcaaaagtaattgcggttttgccattacttttaatgtctgtagaataggccagggtatattatgttctggcacatcatgtataagattgaattggcttttgtccatgagggttaaactcctgccttgtacactggaaacaaataacacttgtttatttgccatttttagtttacaggtgtctggaacaaaccatcatgtatcttacaaagtccaacgtcaatgtcattcttatttacagtcattgatttagacaaaggttgattttaattcattgatatatatatagtactgtaaacaatctataaatatgatttgagaggtcagatatgcatatatcttctctgagtacagaattttaaaatcactactacgtcctaaaatattttgagtcattttatggtttaatattacaactcaaaaaaaaatgtaccatgaagtaacctgttactctgtttctttcaaagggagttctcgctcttctgaaccagctaaccaaagttttgagagctgtgttaagataaattcacacaactacaggtaattttaaaaatatttctcatcaaaggtaaagcaaatatatttttatgccaagaggagtttttatatattttgggctattgtaaaaccttactttttaggcctaggataaaattaaggaatatcttttttttccgagcccatgaaaagtgatagaaaatattttcatttaaaattcagtcttaatattttcagtagtagggggtagagacttatatttgtagttttttatagttttctacatgcttttcatagctgttaaatcatttaagcatacaaggtttcatcatggatcacagggatactgttatttatattttatatttgagtcaatggagttgcaaaagttaaccagttcttaaggtcacaggatgataaagtgctagctttgaaactaagccttctgacattaagccattgaattaattattttactttttgaaataacttctctgtgttaattttcaaactcatctagaattttgtatagcctgatttattgatgcaatggtagcctccacatacactctctggcaggctatcccagaggtcatgaaactaaaaggctcccacaccaaatgaaaatgttcaaattacagcttttgttacatccattttaaaaacagtgaaaagcaagaagaaagatattggatagcttagcacacttaggaaaagctgcaagtaggcagaaggacgaactagctgaattctggttacactaataaacacgtgccctgtttctctctgctgtatcagcctcccctgctgactgcagtacttctgcagcctctctaagtggttcaggctttttgatgtatcacttgttggtttttaaatttctcttgctatactgaaaacaaatatgaataacaaaaacaatccgttcttgcaaagggaaagtgcttctctttgcattctctttgcatttcttcttttttttaatgtttggcttcatcatgctctctggtactgtctggttaacttacacaggctgatagaataggtcagggtatattatgttctgatatatcatatagatgtatgatatagatagagatctatatctatatatagaggagaggaatagatatactctattcagagtagacatatagatctatgtatctctatatagatacttatatatagagagagaagtatagctctactagctacatttctaatgtttatcatagtaacagtatgagtgtcatccatactgctttttttcttgtcttctttagcagagctgaatattctcaagtaaactaacaatagctgaccctcctatcccttttagttatatcaaccctctgaacattggagagtggcccctcgggactgtcaaatagccaggtttatctttcagagcattattgcaccccagataaaacagtgtgctcctcatcttcattcacccaacatttctacatcagtgaaatgagaagttaggaaaggaggtggtgaaattagattgcctgaatttgcatgttagctctgccactttattaacgtcaattaacagtttattaacagtcagttaacactattaataaagtagcagaggcaagatgcaaattcagacaagaactggatatgttattttaccactctgttccctatctctaaaatgaggataaaactttgaaaggttactgtgagaattgaattttataattaacacaaggtgcttaaaatactgagcatacaatgttccgcaaatgttagcataaagggggggaagcactatctagactcatgtgtcgagccatgtgtataatgtaagaactccttttttctactagtaccaagtgggaaaaggtatctcttcttcctcaggagttaggaaggaacaagctattggtaagatttagacggaagagaaaagactagatgggcactagaatatagcagtcaaactctggtattttctagttatgtttgatacactgaccctaagtcatcacaaattctagagtagacagcctgagttatgtgtatattttggatatgacatttcattgataatactttattcttctagtatttctgatattataaagaaagcatataaaatgggttatcatgtccccaaagtgatttgcagagaaaaatggtgcttatttaacaatctagtctttgctctcccttggaaatggatttttatgcttcttgttgtttcttgtaccttctgcttttaatgaatattccctgtgttagtttgctagggctgctataacaaagtaccgcaaacagagtacttaagcaatagctattcattgtctcatagttctgaaggctagacatccaagataaaggtgtcagcagcattgtttctttatgagagctatcagaaataatctgtttcatgcttctggtggtttgatgtcaatctttggtatttttcagcctgtagaagcattaccaagatctccacctttatcttcacatggtgttcttcctgtgggtaaccatactgtagtttgaatgtgtccctcaaaagttcatatgttgaaattttggtccccagtgcagcagtgttgagatgtgggacctttgggaggtgattgggtcatgaaggctatgccctcatgtatattttaattcattaatggattattggattaattggttattgaggaagtgggtttgttatcacaagtagatctgttgtaaaagccagtttggccatctctcgtgagctcctcctgcctgtgatgacttctgccatgttataacatagtagagctcaccagaagctaaccataaccaccttcaccagaagccacctgatcttggactctccagcctgaagaaccatgagccgaaatacatctcttttcttcataacaaacagagtacctgtttgttatataataccagtttgttataacaaacaggtattgtgttataacaacagaaaatggactaaaacagtctgtcttcaaatttcccctttttaatcaggataccactcatattgtattaggcacccatcctgttccaatatgacctcatcttaactaatgatatctgcagtgaccctttttccaaataaggtaacattctgagatactgggatttaggactttaacagctgaattttggggagacatgtcagcccatcacacttctgaatttacatgtgattcctctatgcagacaactttgcatcccctgaggaaagatagtggtttttcttaagagaaaatgacatttgtaataggaattttaagattttattacttcttctttcatctcctcaaaggaatgaagaaatgttggtgggcagatcttcctttcccatgcagtattttccaattaataatacttctttacctcaagaatattttctctttcagaagatggtaagtttaatatgcattttatttagtatataatatgatacaaactatgaagaacataaaggctatttgtaacatatggtgcccaaatctaaactgggatgaaggcacaagatgtcccagcactgtcctccagtggtgtcctggcctaacaccatcatcctaaatttcagttctaatgccttagcaaatggccagggtgtcaacagaaaagggatggacggcagtgacgacatactgcagtccaagtgaaatttgagtagagagttctaatgtaaatgactattttaaaagacgtttgcagtggccagacatggtggttcacacctataatcacagcattttgggaggccagggcaggatcaattgaggtcaagaggtcgagaccagcctggccaacacagtgaaaccctctccatcataaaaatagaaaaaattaactgggcatggtggtgcacacccgtaaccccagctactcgggaggctgaggcatgattgcttgaacctagaaggtggaggtcgcagtgagccaagattgtgctccagcctggccaatagagcaagactctgtctcaaaagaaaaaaaaaagatgtttgcagaattgcataatttgaataatttcacttagtgaagtatttttatataatgtcatcaatcccaaatagattgcttttggacatggatttttaaagtaaatttctccttttaattaaagacaaaactatccttcttgagtatatacttagtccttcatgcacacatcacaggggaaggatatcatagcaatgaagattctcaattggtcgagtaaactaaattatttccagagactaccaaaaattggttttgacccagaaatcttaattatggacttcattgttaaaggtgaactcatttttttttaattcctcataaataagaaattgaagtccagggttgttaatctacagtcccaagattttcagcttgttagtgacaggtgtaggactaacccaggtcttctgattcacagactattatttttgcaaatacccaacgtatatgtgagctttagatttgttaaatatccattttcaatttttaaacagaaattttcctgtaaattgatactttttaacttttgctaaaaaaaaaacccttttcttaactatggtaaaacattagtaaacaatcagttctcgtctgaaactataaatgtcttcatcgaagcattttttatcttttggtagagatggggtaggagagagacacaagttcatggtatctctattaatctttaatctttgaatagttagaaatttgagttaagagcttgtttgtttttaaaggaagcatctctctaaacagtaaataactatgctataaaatatgggggcaatttgccacatatgcacctaggaagctgagttttaaaattttatttaattttaattaatttaaattaaaatttaaaaccgatacttggttcggttttcagaaaacttttaagtatatttgaaacaacttggccatgtgagtatatttttttcaactctaaatttgatgtaatctaaattcagatcaggtattttcaataaaaatttagcattcagattgagatatgccatgagtataaaatacacctcatattttgaagacttcacttgaagaaaaagtaaaatatctcattaattttatatcatttacatattaaagttataacattttaaatggatatattgggataaataaaatacattgtttaatttcactgtttctttctacttttgtattgcagttactagatttaaaactacatgtgggctgggtgcggtggctcacacctgtaatcccagagctttaggaggctgaggcgggtgggtcacctgaggtcaggagatcgagaccagcctgaccaatatggtgaaacgctgtctctactaaaaatacaaaaattagctgggtgtggtggcgtgtgcctgtagtcccagcttcttgggaggccgagacaggagaattgcttgaacccaggaggcgcaggttgcagtgagccaagatttgccccactgcactccagcatgggcaacaaagtgagaccctgtctcaaaaaaaaaaaaaaaacaaacaaaaactatttccattggatagcactaatctatattgtagtgagctatacacagcctcaactctttatattgaccctttaatgaaacacctacctttctactatgagaggtcactgtctttcttataccaaaacacagtttagtttactcatggctattgtataatacatgtaaactgttaattttttttccttaaccttttggatttgttttggtagatgaatgtcttgttttcacagcagtggcatgtgtataatccagtgctgcagcttccttactatgaaatgacagctccacttcctaatagtgcatccgtgtcttcctcactgaatcatgttccagatcttgaggctggacccagctcatataaatggactcaccaacaaccaagtgactctgacctttatcagatgacagctccacttcctaatagtgcatccgtgtcttcctcactgaatcatgttccagatcttgaggctggacccagctcatataaatggactcaccaacaaccaagtgactctgacctttatcagatgaataaacgaaagagacaaaagcaaacaagtgatagtgatagtagcacagacaacaacagaggcaacgaatgtagccaaaagttccgaaagtctaagaagaagaaaagatactagtattacctacaaatgaaacttacctacactgatcttagttctcttatgaaaaaaataagatgttatcccatcaaataaacaatgtcatggctatcttgtcttttgaaatatgtagtaataagacttatctctggtttgctgttcaatttttgccttgaacgacaaaagctttctaaaaatagtataatgtaccactttttgtatttgtcatgatatttttgacccattggcaacaaatagactattgtcattttattagtaccaatgatgaaatttcaccaaactattaatcaaaagtcacttattgaacacattgataaagcatcatgttccctttgattatcccctataaccaacactcaactacaaataggctgggattcaatgtggagtggtggatttcctgaaagaaagtagtgcagatatttaaggattgcatattgttcctaatgaggatgtaataaacaggcattagtacccctttcttttagtacctaaatatgttgtttctgagccatattcttcttcaggtttattttataaagtgaggacatatgataatgataccaaaggaaagataattatcatgaaaccaacttttggatcattccctttttatacaattgtgtatttatagggataccttcctcttctcacatattaattgtatgtcattaaaatcagttggctatgtcagtgtgtattattcacctcttttgctagcaaggtttgagatgctatattaacatttaaatcatgaaaatgagcaagtaaatagaataatattttattaatgtatgatatgtaatacttattgtctaaatcaagtttcctatttttggtttatttattttagaagaaaaataaaattatttgggcatttttgtttatagctcattacaaactagagtgatgaatatatatatttactaaagctaattgaaagagtcatgcaactcagttgggaattaaccactcaattcaatagtaaaagccatgcttggatgtttcttttgcatgttgcctagcattttatagatatttattatttaaaaaaataaagatatgtttttaatgaagagagtaactgaattttaatcttggttacaaatatataatatagtgaagtttgaaacataaatattagtttatttctatctaatcaaaatgaaaaactaaattttgctttatgtagctgatatggtttgggtctgtgtccccacccaaatctgaccttgagttgtaatccccattattcccacatgtcaagggcaggaccaggtagaggtaattggatcatgggggcagtttcccccatgctgttcttgcgataatgagtgagtctcatgagatctcatggtttcataagcatctggcatttcccctgctggcactcacttcatcctgctgccttgtgaagaaggtgcctgcttctcctttgccttctaccatgattatatgtttcctgaaggcctccccagcagtgcagaattgtgagtcaattaaacctatttcctttgttaattacccagtatcaggtatttattcataccaaatacagttatttggtaccaggagtgggacactgctgtaaggttcccagaaaatggggaagagactttggaactgggtaacaggcagaggttgaaacagtttgaaaggctcagaagaagacaggaaaatgtgggaaagtttggaactccttagagacttggagggctcaggagacaggaagatgtgggaaggtttggagcttcatagagacttgtggcatagctttgatcacaatgctgatagtgatatggacaatgaagtgcaggctgaggtggtctcaggcggagatgaggaacttgttggaaactggagtaaaggtcactcttcttgtgctgtagcaaagagactggtgacgttttgtccatgtcctctatagatagagatctgtggaattttgaacttgagagagatgacttatagtatctggtggaagaaatttctaagcagtaaagcattctaagaggtgacttgggtgctcttaaaagcattcagttttatgcattcacaaagatatggtttggaattgtttaaaagggaagcagagcataacagtttggaacatttgcagcctgaggatgagacagaaaagaaaaacccatttctgaagagaaattcaagtcaactgcacaaatttgcataagtaatgagccaaatgttaatcaccatgacaatgggaaaatgtctgcaaggatgtcagaggtctttatggcagcccctcccatcaaaggcccagaggcctaggaggaaaaaatggtttcatgggccaggtccagggccttgctgctttgtgcagtttcaggacttggtgccctgcattccagctgtggttaaaagggacaaacatacagctcaggccattgcttcagaggctgcaagacccaaggcctggcagcttccatgtgttgttgagcgtgtgggtgcacagaagtcaagaattgaggtgtggggacctcctcctagatttcagaggatgtgtggaaacacctggatgtccaggcagaagtttactgcaggggcagagccctcatggagaatctctgctagggcactgcagaagggaaatgtggggttggagccccacaaaagtcttcactgggaccttgcctagtggaactatggaagagggctactgtccttcaaaccccagaatggtaggtccaccgacagcttgcaccatgcacctgaaaagctgcagacactcaacaccagcctgtgaaagcagccaggaggggggctgtatcctgaaaagccacaggggcagagctgcccaaggccatgggagcccacctcttgcatcagcatgacttggatgtgagacttggagtcaaagcagatcattttggaactttaaggtttaatgactgcccctattggatttcagacctgcatgggtcctgtagcctctttattttggccaatttctctcatttggaatgggcatatttacccaatgcctgtatcctcattgtatctaggaagtaactaagttgcttttgattttacaggctcataggtgaaagggtcttgctttgtctcagatgagactttggacttggactttgggttaatgctggaatgagttaagactttgggggactgttggaagggcatggttgtgttctgaaatgtgaggatgtgaaatttgggaggtccaagggcggaatgatatggtctgggtctgtgtccccatccaaatctcaccttgaattgtaatccccattatccccacatatcaagggcaggaccaggtggaggtaattggatcatggggatggtttcccccatgctgttctcatgataatgagtgagtctcaggagatctgatggttttttaagcgtctggcatttccctgctggtattcacttcatcctgctgccttgtgaagaaggtgcctgcttcttctttgccttccaccatgatcataagtttcctgaggcctccccagcagggcagaactgtgagtcaattaaacctctttcttttataaattacccagtctcaggcatttcttcatagcagcataagaacagactaatacagtagctttatctataattcatgtttttgaaaatttaaactggaaaatacaagatttttttcttttaaaattcacatttttgcaacttggaatcatgccaaagggaaaaatatgtttctgagtaattagaaagtaatagatctttaaacaacttattaacttccactcagcctttcctttagttctgaagtttaccttagccctaaattatttcattgtgattggcattttaggaaatatgtattaaggaatgtctcttaggagataaggataacatatgtctaagaaaattatattgaaatattattacatgaactaaaatgttagaactgaaaaaaaattattgtaactccttccagcgtaggcaggagtatctagataccaactttaacaactcaactttaacaacttcgaaccaaccagatggctaggagattcacctatttagcatgatatcttttattgataaaaaaatataaaacttccattaaatttttaagctactacaatcctattaaattttaacttaccagtgttctcaatgctacataatttaaaatcattgaaatcttctgattttaactcctcagtcttgaaatctacttatttttagttacatatatatccaatctactgccgctagtagaagaagcttggaatttgagaaaaaaatcagacgttttgtatattctcatattcactaatttattttttaaatgagtttctgcaatgcatcaagcagtggcaaaacaggagaaaaattaaaattggttgaaaagatatgtgtgccaaacaatcccttgaaatttgatgaagtgactaatcctgagttattgtttcaaatgtgtacctgtttatacaagggtatcacctttgaaatctcaacattaaatgaaattttataagcaatttgttgtaacatgattattataaaattctgatataacattttttattacctgtttagagtttaaagagagaaaaggagttaagaataattacattttcattagcattgtccgggtgcaaaaacttctaacactatcttcaaatctttttctccattgccttctgaacatacccacttgggtatctcattagcactgcaaattcaacattttcgattgctaatttttctccctaaatatttatttgttttctcagctttagccaatgtttcactattgaccatttgctcaagtatagtgacgcttcaatgaccttcagagagctgtttcagtccttcctggactacttgcatgcttccaacaaaatgaagcactcttgatgtcagtcactcaaataaatggaaatgggcccatttactaggaatgttaacagaataaaaagatagacgtgacaccagttgcttcagtccatctccatttacttgcttaaggcctggccatatttctcacagttgatatggcgcagggcacatgtttaaatggctgttcttgtaggatggtttgactgttggattcctcatcttccctctccttaggaaggaaggttacagtagtactgttggctcctggaatatagattcataaagaactaatggagtatcatctcccactgctcttgtgtgtggtcaaagttcagatcctttacagtttccacattctacctctatttctactcatcctagtaaagccagttacttcagaaattagtctgtctctcattaattaactcctcattaagaaaagtcaactaatagcctgggcttgatttgggggaaaatgagcactaatatataaatctctggaaatcttattttactttacaaaactcaaaaagcttttttttttttttttaacaaaggatactatttgcttccacacctcaagcccaggtgagttcagtgagtacggtttctccaatttgccctgagatttgctgaggtacttggtgaagattttattttgcctagtcaaaatgagttctaaaaagttacaaaatgccccagctgtgggctaagtttatttattcacatcaatcattcccaacccacaaaaattacctcatgtacatgcagaacctgccatagcaagtaaaggcaagcaatctattatctggttccaggtgaaattttcttttgagcttctaataccaacttcgcaccagcaggttatataaggattgacgaaaacacatacatacttatattgtaattggataacataaccagtatataaagatgcaaactaatgtactctctgtgttaaaaacttggaatgattgatcccaacaagcctttataacaagttttactgcaaggaatctgaatctaacaatagttggctcaattactttaccttgtttgggaaacataatcaaaacattctctaaatgatagtgttgatcagtccaacatactatatgaatcctaataatgtttttgcttctattttcatttgagaagagtaacatcctggataggaaaataaccctcaccccagccacgtaccccaagctgactatgtcttcattgattttattccaacctccaaggttaatcacaagggaaaccttgcagactcattctgcaatcagaacttgtcaatcagaatcctaagagttattctagacaacttcccatgtacatttctaggaggtcattagctcctcattgtgaccttgttcagtttctctttatttcttgcttagagtatccattaagcaaatcaatcaacaatgattgaatataattctaaacattaattttagtgctgaggctacattactgaaaatgtatggtcccaacattcgagaagctactggtctactggtatcaagtcacttgaccttgacttgatagatgacatcaggataatgctataatataatataggtaaacacagagcataatgagagtgcaagacaagcttcattcctcaagaaaataaatcctgggcagaaaaaagggaatcacctgactatacagaataaaggaggtaatccaggagttcgacagctttctgtacaaactctcagcctttctcatatcttcagctctgcacttcatccttccttagaaaggtggcatcaagttttaagcctgtgcaagtaaaatggcttgctgcttgctagttaccactccatcgccttgagaatataggggcttgggatatggcagtacataaaaaaagataaaaatccctgctctcatggaactcatattctatcaagaagatagaataattaagataaataaaatataaagttatattttaataattgataattacgaggaaatgcagggaaagctttagggattacagagccaaagctggagagagagtaagccatatggatagctgagggaagagcattccaagcagaataaacagcagatgaaggcccacggaggaagcattcctgggagaaagtgaaggaagccaatgtagtggaggaagttgactaagggaccttagaagttattgtacggactttgacatatattcttagtgagggtgctttgtgaatgggagtggagacaaggatagaaatattgagaccattgaagttagccagccaagaaaaaaggattgcttggatcaaaaggtagaaacagaaaggtaagatgttgtcatattctggatatactttaaaggtagagccaacagtttactaagcatcctaatattgagaaagaataaatggcatcaacaatgattccaagagttttggtcagagcaactggaagaatgaagttacttattgatatagaggaaacagtgtaggagcaggttttggagaaaaatcaggagcagaattttggacatgttcattccgatttgcatattaggcatctaataggagataggagtttgtacacacaagtctggaatccagggaagaggtctaggttgacgatataggcattagaattattggcatattcgtggtagttaaaacctagagactggatgaaattgccttagaagtgagtgaagatagaaaggaaacgagtccaaggattgccctgggtcttaccagtcagtatttgtacctcaaggagatgaggaacagccagcaaggtataatgacaaacagaatgcgatgtctgtgaaaccaaatgaaaaaatgttttaaggaggaagatacagtgagttgtgtcatattctattgacaggtcaggcagggtgaggacgcaaaactgatcactggccaggtgcagtggctcacgcctgtaatcccagatatttgggaggctgaggcaggtggatcacttgagctcaggagttcaaggccagcctggccagcacggtgaaactccatctctacaaaaaaatatagaaagtatctgggcatgatggctcatgcctgtattctcagctacttgggaggctgaggcaggagaatcgcttcaacccgggaggtggatgtcacagtgagccgagattgcgtcactgaactccagcctgggcaacagagtgagaatcagtcaaaaaaaaaaagagagagagagagagaattgaccattaaatttagccatgatccttgatctaagacattttgaatgtcttgattctgacaaaagcatgattggagttatttcaagtgagaatagaagtaaataaggggaagactgcaaaaaggagataacttactcaaatgtcctgttgtgaagtggtgcagagaagtagtaccataactcaaaaaggataaatgatcaagaaagatttttggtgggtttgtttaatcaaagacctaaagaatttctaaaatgtagtggtttattttttcattctctgtgattaaacagtttttaaaaaattatttacatttgttgtaattggatttttggaggaagaagagttaaaactgtctggttttcatatgtcatgtttaaaaagaagttctgtgtacttattcacttgtttttaaaatcctttttattaaggtcttaagaaaattaactgtttgttttttgtgtatgtttcacaaaattttccagtttgctttttgttttctttcaagaacagaagagtttaattttcatatcattaatatgtagtcaaacatcagtgttttttatggtttctaggtttttataattatgcttagaaaactcttttacaatcaaaaattaagggaaaacatcaattatgttttctcttagaattttattacttttaatattaaatattggatcatggagtattgcattaggatataaggaggtaaaatctttagattttaaaaagtacaactgaagcaattttgagtttgtttttcatttgtttgtttttccgaacacctgcttgaaggcttattacaccaaaatacgtaattatattctgactttaggtaatcctgcagaagatgcagtcctgatgaaagaagtgaatattccaactaacttaatttattcccacctcagccattggaatggaagtttgaagcagaaagtaagttgaagtaaagaaggttttaccttagctgagttcgtagaatgagatgccagccttctgcatagaacacataccacactcagtaaggggttccagtgaagcagattccatttccacctgaggtaacagtaagttttatgcagatggtcacattaaactcgaatttagaagaattagtggtattttgaaacatccagagtgagaagactatttaaatggccagtttagaggcagaaaaataaaaggcataatacaaacatggaaaataatattgggggaatttaaagaatttaagtaagacatggttaaagacattttgaaatgtgaaagccaactaaatagaatttaggcaagaaaaatctgaagaaatatgacacactttaaaataatgtaagaaatttggctgctatcattaatttttttaatagatgagtgagtctctaaggaaagtcaactgtcagcgttttgcaaggagcaagactttctgaaaatgacccaggttatctgctcttgacaaagaaatagctgaaatgaggattttctcccacttctcctagccaggaaagtaaaatccaagcccaatttccaatggaacaagaggcttccacagttctacccacaagaagtggggactgaaacttcccatgtgcccaggctcttcacgttcaaggcagtagtggcctctacaacagcacacaaacccacaagcacacagcttcagcacgcttctctgagggaataaatggagaatggtaaactgtgccttatcttgtcttgctctaaacttctccactgaagtctattctttaacccatctatacgatggtaagaaatttatgccgagtcctgttgtaagacaagtggtgattccaaagggacccatcttacaggacatcaaactataagaaacaagtgtttgaaaccatggacacaaaaaattaatggatctctttttcaaactgtggatctatggagctataatttgtttttcttaataaagatgcaaatcagaacagccatttgctgcaatttccacctttcaaataaatgcatacaagtaaaacctgattaaaataaatatcacattcagaaaacagcaatataagaagctccaaaagatcagcctgtgaattttacatggaaatggaataggggaagttacaggtcattactttgatgaaaatcccagatctatttttccagcaaactgggtccacctccaccttctacccacagaacatccagccacctacacactagcttcttccccctcaccaagtccatccaagtagaacttagccagtcattctgatccactgcaccctaggagtaattgagaaccatatgaaaaaaatgtgtgcaggataccataatgttcttttctgaagaacattaaagataaattcactgaactgtatcaaagaactaaattttcaggcaatggtatgaaaataatattaatcaagctttctttgtttactgcaaagttcattactctattttgggagtaggaaagtgaatgaatgaatgaatgaatgaatgagggactaagctgtaagaggttaataatcacaataactactatttattcaggctattgcactccaaacattagccttgagaataacaccatagggatgaggaaattgcagttcagttgcccaaaaacacacatctttttttatcaaagaaaagctagaatacaaatcttgtgggactcgttccagtgtccttaatatttattaccacactgatggtactaaggatctacttgcagggtctacaataactggaaagtgatttcaaatgaaaatttgcttaacagaaatgatgattagctcttgctagaactgatttcattgttaccagtctcctagatataatctaatccttagatatagactaaggatgaagctctatgtaaatattctgccttagcttaatgtaaatttcagatctattaaacttacttcaggaaaatgaaatggaggctttcctataatattctgtgcaagagaaccattttatgataaaactgcttttttattctttgaccacttaaattgtcctactttagctttttatttctccaagtttcaataatattcactatttagaaaatacgttttcttgacaaaatatgcactatttagaaaatataggtaccagaaattttttaaaaaaactaatgaagtgagtgtgtgcttaagaaaagaagtatcgtacccaaacaaaacaatgcaagtaaattttgaatgcagaaaaacctaccttttacaaagatgaatgacaatgaaatgtcaccttcttaactatttttatgtacttcacttttttgtttttgcttcattcaatttttattgaatcaaactttaagcaaacttgcttaacgaaatctgaaattggggagtgactgtattgaaatttgaaagaaagctacaatgtaaggcagggttgttgcccagagagcctagcagctgcctgacaagacacctgacaagctggaattgttgaattcagcagggttcagggtctagtctttcattttgaagttcaggagcctgattatatctgcacatctattatggattgcttcacattaaataatctcatttacaaaccaatccctctctcaccatgattgacattataacaaccattttgattaaaggatacaacttctttaggtcacatatttctaaagtagctaagcatacatgacccacaacaggctagtcttccttgtgatcttcctcttctagccaaaagtgataagtcagtactggtgctcaatccaaagtaggccaatcatggttgattctgctggaaaatacaaaagagaaagagtagctatattcagaaaatgtaaatctaagggctgtctgtagccatgttttcatcttgtggataaatgaaacatgaagtcctttacagaatatattaacattaatctgcagagaaagcaggaaaaaagaaaataataaaggcatgtgagacttcctaagacctagtagttttacaatatgttccctcttttcgcttaggtatttgatttggattctaagtaatacactctttaatacaaatattttttgtaaagtaaaaatcatagatctagctggtagagatctctctgttaaaatctgaattccgtcacttctaatcttttacttagaggaagttgcttaatagtgcttgtctgggttttctcttcagaatgattgtggtaatttacatttctaccagctgtttatgagatattttccaacagtttcaccctcactagatatttaatgtctttaatatttgctaatcaccaatctaataaatgtgctactttgttgatacttacattttcatatgctttattataaaataacacatatgaggaaaagaaggttgaattttttttcttgtttattaatcatttcctgattcatgtgaattaaattcttggtacattcttcctattaggggctcatgtttttctaaattatttttaagaggtccttatatagcagaagtaacaactattggtatctgtaatttttgcaaatatagtttccctgtttgtcacttgctttctattttgttcagatatctttgagctggagaatttacagtgtgtactcaagcctaagtctgttttctctgttttggtgtatgccttgtttgattttctcaggaaggctttttattattaaattatgcgactatttctagcttttcctctggcatgttatttcatctttcacatttaaatgtttaatctacctagaattaatgttattgtgtggtataagttaagggtctatcctcctctatgctccagttggttaaagtaactcttcagctgtatagtaaatccttacttgtttgtgtctcggtgttttttattctaatccattcaactatctggttttacaatactgcattgttttaattactctagcttccaaataatgtactatttccataggctttttcatttccataaaacatttaaactaataaagttttgttgcaattaaaatgtgtttttctgcttgttttatttgattgatgtaaaatactttaaattcaataacttcttaccaataattttataaagaacctgacaaaataatcactttaaagagttaactttgctttgaattcctgtctcctcttttctaatgtaaggtgaaagatctacagtactggcaattcattttaaaaatatatatgaaaagactgcccttctgtgacaatataattcacacttttaccaattttactagttttcagtagacttcagggtgaagaggataaaacagcatccatacttttgaacatttatgtaaatatatcattagaaataaataataaagggaaatttatttccaaatcactctccttttttcttttctcacttttttcttctctctctcatctttgttcaactgatagctcttgtaacacagaaatttatgttttattatgcatattctttaccaattataaaaatgggccaatcctatttcaagtggtattgatacctaatactgaaaaaagggctaaacgtcccatagtctttgaacatctttatgttaaaaaggtgttgtactacgtagagagctttattctgtgactctgtggcatctggaaaccaggaagagcctgctctggaattcatataacatggcctctggctgaagagtggaaataccaagtcttattggagagagtcaaggtggtataattattacaggtagacatgtgtatgcccactgtgtcttaagtgaacgtgtatgtgaaaaggaggaggaactgtagcacatggcagagttatctgttctctctaggctgctagatttaagaacaccagaaacagcaatccggcttcaactgagaaatctgctgaggaagttttttctagctgagacaaacatgaaggcaggaatgttttgtaggtctgctatagactgaatgtttgtgcccccacaaaattcatatgttgaagccaaatactcagtgtcatggtatttggaggtgaggcctttggaaagtaattaggtcatgaggatggagcttccatgaatgagattactatccttataagaagagacataagagagcttatttcctctctctttctgatctccaccacgtgaaaatataaggctgtcatctgcaaaccaggaagtaggccctcaccagataccagatctatcagcaccttgatcttggatttcccagccttcagaactgtaagaagtaaatgtttactgtttaagccaggcagattgtggtatatttgttatagcagactgaactgactaagataaggcctaagtaaatctataacaaagcgtgtaggcagcaggctaaaaatgcctttgcatttatggaagtaacattccttgacaaagctcccctttagtgcagcaatgaaatttcagaaaatgaaaattaagagcattttccggattgcaaagatagacatccacctttgcaaatgtctagtctttgtaagatagtagcagtgtttcaaatgacacttgcagaaaaagaagagaatatgtttgagtgaattttccccaaaaatgtggtaaatatgttcatcagaataatttttctactaggaaacatccttaaatgactttaaatttgcaatttatgtatctatacaatgagcactgattgcctggtattaaatagccctaacattctgtcagagctgaaaccagattcttacaatagacttggcaatgctaaatactgggttctgtaataacagccctcacaactaggagttggcttttgactaaattggctggtcagtgctatgagattcatgagcgtcctattagctacgaacatttgaaaaaaatgtagccaaaatatggaatcaacctaagtgtccatgaatggaggaatgaacaaagaaaatgtggtatatatgcactcacacacacatgcacaatggaatattattcaaccataaaataaaaagaaatgttatttaaaacaacatggatgagcctggaagacactatgttaaatgaaataagccaggcacagaaagaaaaatactgcatgatctcacttctgtgtggaatctaaaagttaaattcatagaagagaagggtaggatgggggttaccaggggtcacggtgatgggggtatagaggagaaatgaaaaaatattggtcaaattgtacacagtttcagttaagatctccacccaagatctattgttcaacacgatgactacagttaatactaatgtactgaatacttgaaaattgcttacagagtagattttaaatgttgtcaccacaaaaaaaaataggtacatgtggtgatggatatgttatggggcttgatttaatcattccacaatgtatacatatatcaaaacatcatgttgcaccccataaatatatatgcttttaaaaagaacagaaacaaatttacacttggggatgaattaactctcctctaagaaatcacatacattttcagtgattttgtactgtgtgaatatagctaggctagtgctacattttccagaattctcttctttgtaatttcaggccagggccaaccataggagaaacgataattggaacggccccaaagcagccaccactaggctttatagttctatgcagggcatcaggcagtattgcagtgcaaagaactttgttactggtctgctggctcatgttgttggtgtgggtcaggaggcaagcccacagagcctccacatcccgtggatctcccagtttagcttttctgagtcctgaagcaggcatgtgtacagttctgtagtaaacacagcagctacgcatacaaatcactcacatcatcatggttggatattttgagaagtgggtatggtttccagtttgtcctaggtcactgatcacgtgtgtgtgtgtgtgtgtgtgtgtgtgtgtgtgtgtgtttccacttctggccctattgatctatagcaacttcaggctgcccaccaaatgcagtggtaacattcttctatgattcgtctaccctatattaaatcctgattccttatcattcatggtaagtcttcttccctggttgtaacctataaagttgggtgcctggaatgaaggtgttaccacaacaaaaacccaagcccattggctctgggacaagatagcaagaagaagatgaaaaggacttgagaagacctttaaagctggaaggggcttcacgagacaatgaggatgccaaaaatattgaggatattgttattggaaagttcagtcacacagctccctgttgtaatatggaaattaaataggatatctagcacactttttgatttagttggagagctttgcagacagaataagaaaaatgcccccaggctttttctagcttcctgtaattaagtacaacattggttgggggagagaggctaggaaagaaagagagaaactgttccattttaatttatattttaggaatttagaagaaatataaaggacccagagattgttggatttgaaaagaaaatgtttattcatccccagttattgcaagcaaaaattctcaaaaagaaaagaaacagcttcagcaaatataaaatccagcacactaaaagaaactcaggataaaaatcacaagtatgtggctgctataaatcatttagttgagacctcaaaaactgtaaggatgaaacgggagagttccctgatccccctcactggacatgtgacaggggtgtggcttgcctgttcagttgagctatttgattgcaaaacatggccattctgtgtggaggaggacccagaggtcagaatcaatagcacagaaggcagtaacaagaaacaaggggaatcatttccaggaagcagacctgttcccaaccctgaatgtcagaattactaataaccaataacagccgtgcctctgtattccctccacttgtgaactggagtttctactgcacttacctttcttcatctcaccattgtgtggaattacaaaaagtctttttagttcacagcttatcagatacagaggaacaagggccaattggccagaacacctcatccatacctggatctgaattagatgatagccccttgaaacctggcctaagaaaggtgctataatgcaatgagaacttcacaagactcatgggaagggttaaatgtattttgtgtatggtcagagggaaggcaatggctcattaaagatgaccataaattctttgacattcatctcatgtacttatggggtatacatgccttctccttgaacctaaatgggctctttgactgctttggcaaataaaacacagccaaaatgatgttatgtcagtccctgggcccaggacttaagagatgaacattttcattttgtgtcttggaatacttgcctttgtagtcttgagtcttcacataagaagtacaattatcttgctagaaggaccatttggagaagttctaagactacatggacagggaaaaagcccagatgagcccaaccttccaacaattcctgctatggctaggcctgtgagtgaacctattttggatctctgaatcagctcaccagctgaatattaccacatgatgcccatcaacatcacagggagcaaatcatgagatataatttttttttgtgtgtgtgtaaataaataaggcttggggtaatttactacactgaaatagataactgaaattatatctcaatgttaggcatcccaggcttcagctgctgggacatggaaaaaaagccatccttatcattttattatggcaaaggcaaagcacttccccttttcttggccttcatggcagtgagttggcctcaaggtatagctattctttgcttcccatactgtaaatcttaccagcaccattcttactgggttagtaagctttttaaactttggaatccaataattggaagccatttgtatttcatacccagatacatccccctcccaagctttatcagcaataattgtgttttggcctccatctacactcttttgttgtatttctcttaccttcagaactcaggtagatatgggagtagggaaaggagtatttccttcatccccttctaaacttcatcaacgtgtagtatttctgccaagcccaacattcagaattttaatgcaatcagattagctttatttgcttttaaaaggcagtaagaagaaaggaaagaactgatttatttgtcatgttccattaaccaactctaataactttctatatgctccctaaacaatttaaatgcatttctgcaaattgacctgcctttaatctctttgatacatatctgttaactgggaggtttatatctacatagacacctatacctccctgtatttaaagggtgagtaaaattatacagctttaatacttattttgtaaatttatttacctctcatttcattttaaacataaaaattccatttagtcatatgctatatccataaaccaatatgttttaaacttagtctgaaaaagtcataggaaataatttacattaaagctgttctaagaattcacaacttctgcttattgttggcttttggtttcctctcagagttggccatctgggtagctatttcttggacttcttccctcacacctatgctccagctaccacaaggcacataacctggaaagcttcaaacctggtttaatcttcttaggtgaagtaagattacaaaagcactgtttatctcactaaaaacctttcatttggattacttgggagttccttccaaagggacatgtgtgtaatgacaagacatccctttctttggtctccatgctttcttcagcaggggtcaaggagagctccatatctctgtgttctggtgagagactcaccactctctcttctcccaactctaacccctgtgctcaaagcttcttcatcactatttcccttaagaccattaagatcaatcttattatgctgtttgtctttatttacctcaaccactactaaaaacacaggtcatccctcatttcccataccataggcaccattaggtatgtgaacatccctatgcagatttcatatcccacccgttcccattttggagcttttctgctatgttttatgaactcacagtcattcaacagcaaaatcctctgtgtccttaacttattttcttaccttcctagtctgaaactagattctctcctaaagacacttgttcctttgcagctttcttgagtaataactgttttctcttataccctcctcatacaacttggcctggaggaaagaaagttgcctctttgctcaacattgctacttccagatcatgctccttcttccctgccattgcgatatattactatcaccagccatgcctcctcattgtaccattcatagtgctctcatgtcttgaatttaacacctggctcactgtcagtcttttcaacactgttcctgccaaaattctcagtgatttcaagtataagacctagttgatccttccaaatcactggatctttgatttcctaaacttttctctaatgatttcaactcttaccctatctaatacattcactttcatcattgtatgtaagacttggccccatcaacaaaaaatgcaacttctccatatttaaatttcaagaatcccactcttcgctgaccacctcctatttttccactaacagatatggacaagaacaagacagagtttgtgagagctgatatgatcatgttttaaaccctaggctaaggcagcctaaagaaactgcatttcataaaattgttttattactttattttcagaaatttgaatatttttcacctctgtgtgtaatactatattagacatctttgtgcaaattgttgatttgtgtatgtattacataacaacatacatctccaagagttaatggatgcagaaggattcattttagtactcctagtatattatttgaaagtggttagctggttagctttgatctaaagagttatgattatgatgagtgctggagagataaaatacttatttttccctctataattcagtattgtttgaacttttaaataagaaccatcatatatgagtcagttatgtaactaaaagctttcagttttgaaaatagcaagtaatattaaccagtgattcacaaaagaaaaaaaaactatcaatggatatataagaaaaaatgtcccaaagatgaagtctgaagccagtatgaatattcttttattctttgtatcaaattaattattctaccttcataattttagaatttttctcaatacttgtattagtttgtcctcgcactgctataaataagtatccaaaactgagtaatttataaagaaaagaggtttaattggttaatggttccaaaggctgtagagaaagcaggatgctggcatctgctcagcttctggggaggccttaggaaacttacaatcatggcagaaggtgaagcaggagcgtcacatggcaggagcaggaggaagagagagagagtggggaggctctacacacttttcaacaactagatctcctgagaactcactatagaataccaagggacggtggtgctaaaccattaagaagaaatcacacgctcatgatccaatcacctcccgccaggccccacctccaacagtggggattacaattcaacctgagatttggatagggacacagacccaaaccctatcaatactattgccatcttatttatagaatatttaaaatgtgacattcttctcattgattttacctgaaatacacttcattcttctaaattggcctttttttccacttatgggatatacaagaacactctttttctcatccatctctttttaaattacatcttattcactttcataccaacctgttctttctttgtagtcttcttctcatatttaattaatgttgaagcatcttgtgtcctgaagagaataataaacatgctcattactacatttcttaaagtaagtatttttggaatttgcctcttctccgaaatatcatgatttgttctctgttgctgtataatacattttaatattccctcttttataagtacactcattcctaaatgaggagaactctcccagctgcagtgttaacccaattacatgaagtgaggaatgagtttatgtccattgagtttcaactggggtacaaatcttattcttacctggaatcagagggctatgggtggaccatgggctgagttcatatgctctttcattgctatgaaggcttttatctgtttgggttctgcagaaattaaatgagctctttctatgttcacctctggctttttaacattcctaccagataatgcacatggatctgtaaaatccccagtgtgcaccatgagagaaggtcttcctgaccccctccctgtttctcatgcttgttgtagacattacatcttgcagaaaatagtaatctgccaccaccagtttactttcagatggcccttggttccatcccatttgtatgataggaattttggtctctaatgtaatgtagaaaaagttcacttaaaatttagatgttgacatgacaaagtagcatcgaggcagtagatcaatggctgtcaaggttactattcaataaagatatttgcatttagaaacaggaagaaagtcgcagagaatcaagaaaggatggctgttgtgggaagtcagggaccccaaacagggggacgggctggagctgtggcagaggaaacataaattgtgaagatttcatggacgtttatcatttctctaataatactcttataatttcttacgcctcttactttaatctcttaatcctgttatcttcgtaacaggtcacctcaggaccctgtgatgattgcttgtttacttttgggataatttgaaaacaaaatcagtctttgtatggtatttttcccccacctgcttggtttgatttttgtttattttatatctcatgaacaaaagtgttatttaataacttcttgccattttaagaacatgactgtaattaatttgcttcactcagcttctaagataaccactagtataaacagaataaaataaaactcacaaattgtacaaactgattgtaaaacatgtgtgtttgaacaatatgaaatctgattgtaaaacatgtgtgtctgaacaatataaaatcagtgcaccttgaaaaagaacagaataacagtgattttagggaacaagggaagataaccataaggtctgactgcctgccgggtcaggtaaaaagagccatatttttcttcttgcagagagcctataaacagacgtgaaagtaagagagatatcgctaaattcttctcctagcaaggaatattaaatattaagaccctaagaaaataattgcattccttgtggaaggtctataaacggctgctctgggactgtctgtcctatgtggttgagataaggactgagatatgccctggtctcctgcagtaccctcagggttattagggtggggaaaaaaaatcccgccctggtaaatttgaggtcagaccacttctctgctcttgaaccctgttttctgttgttatgatgtttatcaagacaatacattcacagctgaacatagaccctcatcagtaattctaattttgccctttgctttgtgatcttgtttttaccctttgccttgtgatctttgctggacccttatcaggagttcctgattttgtccttgccctatttcctcggaagcatgtgatctttgctctgccttttgccctttgaagcatgtgatctttgtgacctactccctgttcgtacactccctccccttttggaatccctaataaaaacttgctggtgttgcggctcaggtggccatcacagacctaccaatgtgtgatgtcacccctggtggcccagctgtaaaattcctctctctgtactgtttctctttatttctcaggccagctgacacttaggggaaatagaaagaacctatgttgaaatattgggggcaggttcccctatagatggcttgctgtttcccacagctgaactcattggccacttacttccatcagccaggcagtctccagaaaattctcccagacccaggcaagatactaccatggctgttgtgagttttattttcttctgtttctactagtggttatcttagaagctgagtgaagcaaattaattacagtcatgttcttaaaatgacaagaagttattaaataacacttttattcatgagatataaaatagacaaaaatcaaaccaagcaggtggggtaaaaataccatacaaagactgattttggtttccaatgatctcaaaagtaaatttaaagtactgatattttctgtaattttcatttttttaactaggaaaatcatataaagacatgctaggacaattcatttaaacataaaaaataaacatttcataaaaatcacatcagtgctgatgacttaatggcagcctaatatcctgaaagtaaactaatctgtcaccatagctttttttttttttttttgagacaatctcctctgttacccaggccggagtggtgcaatcttggctcactgcaacctctgcctcctgggttcaagcgattctcctgcctcagcctcctgagtagctgagattacaggcatgcaccatgaagactggctaatttttgtatttttagtagagacggggtttaaccatgttggccaggcctgtcaccatagcttttgagggctatttggtacctttaaatcaaataaactgggtattaattcttcttaacactcacctgaagattcattgtttattaatacttaagtcaagtgtgtaatgataagtaatctgattgcaggcacatatacatttaatttgatttatatggttacttagaacattttcagaacttaccatattctagcagttctaaattccctatataacaggtcctttaatatttcttcatgaaatggaatacctgaaatccatatccatcccatattaagtacagaatcatggaccaatgaaatttgcataattttatatgcaaagtgggagacaatgatctatccccacgttggggctaaagtactaagattgtcctaagtaccttgtaaatgcttagtaaatatgattttccctctagaccacaataattattccacatttgttcaagagttctatttgtacttatgagagggcacatggaaatggaccaacattctgtcagtacaaacactgaaaagcaaagctttgttccccaagaatgagagaacactcaacaaagcagcatggtttaacagcttgcaatgttaacaaaaggatattttacagtatgttcagctctccatatctctgtgcctatgcttatccattgaatcagataattgatatcatcctttaattcagttatctgtgcaagaatctattttaatatttctttaccctgtagaaaacaggattagaagaggactatacctcatttcctcaatttttaagtccattatctaactagcatattcagattgtgaaggaaaagttgctataatgtgatacagcaggaacagtgagttaaaattcttcctagcaaatccaaggcaactatattcacatcctagagtgcagtgatgatggacataactagatattcggtgttcaacatatcattttactttattctacagttttatctatgcaaagacaatgttcgtgttctgacttatcatctcctctgctaccatggagacaccaatgtttaaaatactttacaaaattcatttttgcagtgagaaatagaagagcaatatatgttttacatgtgtctgagaattgttatattataatcctgcagctttctgaaagacaaatagcagttgataaatacagaatggttatacagaattatcaatccttcttagtggctttcagaaggctaaggaaatcatttcagacttaagaactatgaagccaaactaaacactaatcccagaaaaagactccttgtcttgcattctaaccataagtacttcctttgagatttcgtaaaacaagaaaacaaaagcaaacaaacaaacaaaacccttaaaaacagggtttggctattaatccaactaattcttatatgcggaatttttttctgatttatcaaatccagtagagagtaacaaccagttaactacacagtaagcaaactccactctgacaaccataattcaagaagctgtagacatcaagcttctagtaaaaagtacagagtcaggggcattcagtatatgttaggactgatcaattaactctccttgaccctttgctcttctctcatgatgctttttgtcaaaaatacagtcatcatcacttaatcgtggggatatattctgagacatgtgtcattaggtgatttagttgttgtaccaacatcatagagtgtacttacacaaacctagatagaaagactaactacccacctaggctatatggtatagcttattgctcctaggctaccaccctgtactgcatgtgactgtcctgaataccacatgcaattgtaacacagtggtatctgtgtatttaaacatatctaaacataaaaaaatacaataaaaatgcagtattataatcttatgtggtcaaccaccgtatatgctgtcacatagttcagttgttgactgaaatgttgttatgtggtgcctggcggtatctcatccatcaactctgtgaagcacacctgtgtccatattccatcccccaccaagctcaccctgaataccaatcccttatacaaaaatgcctattgtgtgctataactgtggatattgaatgttgttgattgtttggaaaacaggggtgaaaagccaagattcaaaataataggaagttctgcttcaaaaactaagcacttctccctgaattccctctcaggaagggaacccttcttgaaatgtatctcagaggtgacaatggacagctttttaaaaaaactccttttaatcacacacttgtgtgtgcataggtatctggctgacacctgatcattaagaataaaatagattattttggtccacagaatttcacagatgggtagtaaaagtcagttgccagttccattaaataaataaaacaacaacaacaagaaccttagtagagctcctttataaatgatttcttctactacacaaaacagggtgaatcactgtgaaatgtggccaggttaattaatcaaaaggaagatgcttttatttgatattgttcattgacagaatttttttttcagaaaagccacttttgcaaaatatgtaggaaaaatacttaatataattataattccttaagaacttaaatacatttcaaaaatattatctaaaaatgtgctacaactagcttagtctatttctagtgaagtgttaaaaaaagaattaaagaattaatcttaaaagctagcatctgtgttttcattgtgtaaaatctttgtttagaaaaataccttgaaaagccactagagggcaataattagcgaaaaactaggaaatgtaaaatgtaccaggacccgacagaaatgaataggatggtgtgggaaagaacaaagaagaaaaactgaggtaaactgaaagaggagcaagagagaagacaattacaaacatggtgcaagacttcatccattattggcagaaggtgccacgggacagtgttcactattcagtttcaaatttgcagcaatatcaacctagactgtctgtccagagcaccagtaaagtcagcaatgccagcaaaggccttctgtgaatagggtgtgtgtgtgtgtgtgtgtgtgtgtgtgtgtgtgtgtgtgtgtgtgtgttgacaataaggaaacctctggagtcggtatttgagtaaacaatgtttggaacagtgccaatatattacttgtcttaacttagtagaagcaagagtttgaaagtaaagatggctatggcaatgactatattgagtactcctagaaatcttggagatgccttttaatttttcacaagacatgaatttagggtttgaaccaatcttgtgatcttaagtggcaggaacagtttagctatcacaaattgtagattaaacacaaatacacagaacactccttaattattgaggaaaagattagcacagggcttttaaggggttgctggttcacagtggcagataaaacagtcatatgcatacacacatatataaggcaaattttggcataaaaaacaacacatatacatgctttatttttggcatatatatgtataggtgtgtgtacgtgtgtgcgtcatatatataatatatatatatgttgtttcatatgccaaaaatcaggcatataaaacaataggaagtcccagaagaaagaagagcccagtacatttatgtaatacgctgttcctaaaagtgggggcagcaataaaagtactctagacccagagtttgcagatatcaggaataaggaagtatccaggagcaactgccagtgtgatctgttatgttatttgcagaaggatcccctgggctggttttcctctgcccatctcctgtgggatcctcctgtggggagcagcaccaaggcgctagaactccaggtggatctgcaagaagtgcatcacacttaccactgaccttagcaggtgttctttgtttttattccatttatatttacatttttatgatagaaaactatactatttgaatatcaatattgttactaattctagggatgtggaccaaacagataaatgtaatcaaaatggtttcattttataaaatttattttttatttctaagtcaatcattttaataggtatgtactggtatcttactgtggttttaatttacattttcctaatgaataacaatgttgaatatcttttcatggcttttttgccacctgaatatattttcattggtctgttcaactcatttaaaaaaattggttgtttgtattcttagtattgggttttgagagaattctttttatattctggatataagtccattataagatgtgtaatttgcagatattttctcctagctggtgcttgtcttttcattctcttaacatgttgtttgaagagcagaagttttgaattttacgaagtctaacatcaacttttttctttaacttttattttagcttcccaggtacatgtggaggatctcagttttgttacgtaggtaaatatgtgccatggtggtttaccgcacagaacaacccagcacctagctatttagctcagcatccataagctattctccctgatgctctccctcccgccatccacccaagacaggccccaatgtgtgttgttccccaccatgtgtccatatgttctcatctttcagctcccacttacaagtgagaacacatggtgtgtggttttctgttcctgcattagtttgctgaggagaatgtcttccagctccatccatgtccctacaaaggacatgatctcattcctttttatggctggatagtattccatggtgtatatgcgccacattttctttatccagtctatcattgatgggcatttaggtcgttaccatgtctttgctattgtggatagtgctgccgtgaacataatcatgcatgtgtctttataatagattgatttatattcctttgggcatatatccagtaatgggtttgctgggtcaaatggtattctgcttctagatttagaggaatcatcacactgtctttcagaatggttgaactagtttacattcccaccaacagtgtaaaggtgttcctttttctccacaacgttgtcagcatctgctacttcttaacaaagatggttgtaggtgtgtggccttatttcccagttctctattctggtccattggtctatatgtctgtttttgcaccagtaccatgctgttttggttactgcagccttcactttacaaaatttctaacatatctgaagggttgctaacttctcttacaagttagggaagtcagtataccataaagcacttgggtgatactttgtgcattcccttagagaactatttccttagaaatccgaagcctgtctctgagtcagggtaattctctgtcaccttgaaactcacttttgggttcattgtgattctgcattctgtcccatttcatggcttcctaggaagaaaatataaactggttactaataggcctaggggggagtccaagagtagtgtttggttttggaggaattcgctttttttttttgaggcggagtctcgctctgtcgcccaggctggagtgcagtggcgcgatctcggctcactgcaagctccgcctcccgggttcacgccattctcctgcctcagcctcccgagcagctgggactacaggcgcccaccaccacgcccggctaattttttgtatttttagtagagacggggtttcatcgtgttagccaggatggtctcgatctgctggccttgtgatccgcccgcctcggcctcccaaagtgctgggattacaggcatgagccaccgcgattctcttttaaaggtgaaagctgtttgccctgagagagtactggtctcttcctctcaaggggactatactgttcttatttggccactgaactgatggttaagtacagtgggttaagagaacaaaaggcctagagatgttacagggaatatgttgttccctctgctcatgtttctactctgtagatatcccaaaagggattttttttttaaattttttatttctataggtttttgggggaacaggtggtatttggttatatgagtaagttctttactggtgatttgtgagatttatatttagaatttatattaataaatataaatttatttatactatatataattaaatctacatagtagatttatatttatgtagatttctactatagtagatctatataagttataatataaatatatagagatttatattagatttacctaataatttatattataatagatttacacaaataaatatcaatatattaataaatatacatttattaatctacatagtagatttatatttgtacacatatatcctattgattgtatttctctgaagaacacggatgaatacgctactgatcttatcatccttccaccctcacatttgcccatactttatacaaccgtttggtattgctatttcactctttaaggggtgtatcacaggttgggttctacaggaagcagactctgtgatggagtttagcatacagtatgtttcctagagaatgctcttgggatcgccaccagtgacaaggaagagatgtgagcagcaatgggcagaggaaaaggtgaagagtgaaggaggccactgcctcttcataatcggagctatcctgttttgcactgaagtggtctggtctttgtaccccaatgtctaccagtcatttactgtagccaccacagaagtgtgtggcctttggccagactgctcttagcagctgagacaaccctgtgaggacttggcaactaaaggctctctgctggcacctatcccagcaaactttggggtgacaaatcctccttgaaggttgtctgggtggtgcagcttcatgtcccccactgggtcattccctgattgcttttattacagattctctccctgcagtttttctttgtttctttcttttttttttttttttttttgagactgagtgtcactcctgtcgtccaagtgggagttcaatgcaatggcgcgacctcagctcactgaaacctccgcctcccgggttcaagcgattctcctgcctgtaatcccaagtagctgggattacagccacctgccaccatgcccagctaattttttgtatttttagtagagacagggtttcagtatgttggccaggctgctctcgagctactgacctcaggcgatccacctgccttggcctcccaaagtgctgggattacaggcgtgagccaccgcgaccagcccctccctgcagttttgaaagagaacttattcatagttactacctatagtattgatggagaatttatcaatagttcctatctgaagttttgaaatagaacttattgatagtttcccaaattctggctccttctgggaaacatctaacctcctcctttttttctccagttggatctcttgagattcctctatatcaccttctttccccccggaattactccctagcttgcttcttgaaactaagtcggtctaggtatgttctttgagttctagtccccttttctctctcattatgggtctagtttagcttctgaatactcaaacaccctctgtatcttgaagttttagcactcagccagcttgtcctctgttgtttcttagagctaaccctgttatctgagtcagaatccatctctacaaaaaatacaaaaattagtcaggcgtggtggtgcgtgcctgcagtggtggtgcatgccagctacttgtggagttgaggtgggaggatcacttgagcctgagagatcgaggctgcagtgagccattttcaccccactgcactccagcctgggtgataaaaagagagctcctgtctccaaaacaaaacaaaacaaacaaaaaaacagtccaactaccaactatatgtgacttacaataaaccaactaatggaaaaggaaaggtatactgaaatattgaaagtaacaaaatataaaatcatacaccatgcaaacataaaccaaacaaacaaaagctggtataactttattgatatcaggaaatagagactttaaagcaaacattattacacacgtgataaagagggcacttgaaaataattgaagattcaattcactagtttgaaataaatttaatgttgtgtgtacttcatatcatattctcaaaacacataaagggaaaagtgccaaaagcacaaggaaaaatacccaaattcacaatcacagcaaaagattttacacacttttatgcataatggaaaaagcaagcatacagacaaattcataagagatttagacaaattgaacaatgcaattagtgaattcaatatctttgtttatctttctatatccatctgactgccaccccacaaacaagaacactgcacagttagagacggaaacttatacaaggtcatagagcaagtcattaaaaattgtagagttttaaatcatatgtatatcaaaggttggtaaaatatggaccagaggccacctctagcctgctgcctctttttgtaataaacttttattgtaataatacagcctcactcattccattactattgtctgtggttgctttcatactacaatggcagagttaaggaattgtgtcagagacctaatgttcccaagatttggggttctgctaacttagtgatcttggtttccaagggaggaatgcttccaccagagatgctttaatatggttccattaaactggaagctgagcccacacgtggccacttggagctccccatgctagtaaatcaacaggaaaagaagaaaatgaatgttatggctgggaaattaattctgactatctggaggatatggattgctactacaaaaagcgctgaaatagaagtaggtctaatccacagtgagttggttgttatttaatctgtccagtagatggtgccaaagtaatattcgtagatgattaggcattctcacaggctattccaagatgaagatttgttcccacagccaaccatccttttttgccttggaaaggtgaagtctacatttgcaattgctaatgccagctggacagccccctgcctatatattgaaactggatggtagtgctagttttacttttggtattgaaagaacaaaggtcaaaccattatcttagagcttttatagccctttactgataagtttttacgaaatcataaaataaacatattctgaaattaaatcagaaagtgttgtgaacatgaagtcaacaatttacagtcatatatcatatttttaattttagaggctatttgaaaggtgtgctctattttaaattcacactacatacactgttttttcccagtgttagccttcaatcctaaacaagagcacttgttaagtactgtttgatcttttatagaggctgttccatcagctgaatagtcaagacgctgtaaagggtttcagtttaaatttacaaagctatacataataaaaatcatttgctaagcaaagtagaagaaaagtcaaaacataaaaggatttaattgtttttggcaaaatggttgagagcacagactctggagagaaaaaaaatctggattccaatgcttgttctgtatgatctgggacaaagttctcaggttttattctgaaccttttgtttcctcagctatataatgcaggtaataatggtttcttcctcataactttgctctaagataacatgagtacaaatccctgggaatatgcttagcatgtaagtcctaaataaatgctaacaatattaattatattatcattatttaacaaatgttgaactttgtgaactcatgtctaaaatatcaaaattttaatgtgtaatttggacctttcatctacagtaaatttgtcttttttgtttttaaaatatctatggaaaccatcttttgttatagaatgcaatgctgtcttccatttaaatagcatgacactgagtatatttaattgaatttgaatggatttcaattaaatcaggatttaatttgtaaatcagacaatttactcattcttttctctgaatgacacattctggttcaacagaccaatatttatattcttgaaaatttaaatatagttgcaaattttgtattaaaatataataaatatttcagaactcatacctcatggatttcaaataaggcatcctacaatatagttccgttgattctgtagctacaatcagacacgcgttttgttcgagttctaaaagtttgctcgagccaactttaatgggaccactgaaacttcccaacagtttcatttacagaggttgctgcacctgtgctacattgagaacatatcaataaagccttgacaactttgagacagccaattaaaaagagctccccagagaatctccaatcggcctgtgcactgggaggacagagtggagccttgggaagttccccccatttgcagggggaaggaacctggtccctcctcttcctgtgaagtaacctgggattctatttgtgagatgggggcctgttaacaggaacccctcttgttttactgtattattttcctttttgcccaataaattccataatccccgcacccttcaaagtgtctgtgagcctaatctttcctggtcctgtgaccaggaaacaacccaatttttagctgaactaaggagaaagtttagtaaggaaattatagtctaccaaaggattaaacatattttgatgcaataatcattgaaatcttatttattatattggcataaaattatatcaatgaaaaaatagaagtttcagaaatagacacaatggattatgataatttagaatataaagaagtacacattgaatattggtgagctgaagaaagttcagaaatagacacaatggattatgataatttagaatataaggaagtacacattaaatattggtgaactgaatagtatttaatcaatactgtgataaatgaattgttcagaaaagactagatgcacacattttaacatattaaaaaataaattctagaaagattaaaagggcaattttttaaatcaaatgttaagaaaaccaatcttttcaaaaattctgcaagagttttagtgctatttgcatagtatgactgggaaagtttatctgaaaaaagttaaatggcctgcctgggccacaatgttaattagcagaagagcaaggaatcaaatacaaattgatttgaacataaaacctacaattgttgattaaaattctatataaattacttagaagagtcctcagcgtgttttagactagataaccttattattagtggtggtgatgtcatcatcactatcattattacccacagagcaggaagatgagtgtaaagttaagtgaaataaatgtatcaatttataaataaataacattctggggacaatgtaagttactagtatgcttttggataatgttgccaaaggttaagcagaaccattagaatgctgaaacctcctgaactagtaattctttgtaattcatttcaaagtaataaaaagaagtgagtaaaaacacttctgcacaaagaagcttatgtcatagtaaaaacttggaaataataagatgttgaataattgacattattaaattatgctacattagcataataaaatattaggtagttatttttaatgataattatggggataatgcaggaaaactatttgtgaaacctaaaaatggaaaaaaataaatgtaaacatggtaaaattgtaactaaatgcaataatagagcttatttaagaactggagcacagaaaattacacatagagttgtcatggggtggaggtgaggatagagtttaggcgatctttttctttgctctttttaatgttttcaaatgtttttataaaataggcagtaatacatttaggcaatttgcttaatatgttcatggatataattataatttccaaatataaatgtaagtatatttggctaagttcaaaataatgtgagctttaattaattgtttcagcgatttcaaagagagaaattcaacatgttaaataatataggttttcagatttctctttctttttgttcaaatttggaaagtttttttatccttaaattaattctcaattaataatcattgagggagaaactgtatctatatttttataggaatcttctttaatgaaggttaatcactttggtagtctttgaagaatttaaagacttttccgacttctctctctgttcactaatgtgcaattttgaaagccaaattaatgaaactcttccttgcatagctcatccttatcccataaattcatctagttaaagtaaataggaagataatgactacattcttgtgtcataaccaccacctttgctttaatatataaagatcgatggtgagtcgaagtatgagaacattgaccaaggaggaggctggaaatgaggttgaaattgtgaactaacctgttgtgaccttttttttaaacctttacagtacacatgattttattgtgtctacttctatacttaaaagatattagctttaatttgaaatgattttttaaatgataagactcctttgtcaatcgtcatccttgactgaattccatctgctgttcctaatacgataattcgttggatctaagatgtcaatgattgtgagccttatcattatttcctgaactactaagaaaaaaatctacaaattaaactataaccaacaatgctttcttgtctatgagatgtgttattttatacttatttagatcacttgtttaggttttagtcaggataaaacttctgtacaaagtctaaacaagcactgtggtcttgggtttcttccaaattctaacacctgttctgcaagtttaaatgccagggtctccttgaatattaccaaataaccatatttcttgctcttcttctctctcaggtattttcttaaacacactgaaggaattcagaacatgataccccacaatatactgctttggtatatggattatttttagctgaaggctcttggaaaatagcaaaggcagggagaaacatttgctgaactccctttatctacataaagacaaaccctccatatgaaacaattgtcatcaatcacttttacaggagttttgtcaaccaggaaagattgactcatcacaggagaggggactagaagttgacatcacacccagacgaactttgccacaaactgtcatatttcccaccccttcttcttctaaagtccactcacctttcctaaaaattatttacccttccctaagttatctatgcccccctctatttccctgtattctcctatatattatgtccctttgtatatggtatatgtgctccagaatctcactgctttgttttttttggatattcactttttctctgcaatgtccctgcacacataatactaaaaattaagaaacgtacattctttttctcctgttaactttaatgttttcagtttatttcacagcctcgctatcaaacctacgagggtagagaaggaaagtctttcctccctctaactctttttcagtgagtccttccctgaccaccatatacaaattgtgacattacccatattcctatccctcttctcttcattattcttcttaacaccacttattgtcatgtgacatcaaaacctttcattatttggatgtgtattgtctgttccccaaacacactagaatatacattttatgttggagggatttttcttcctctgttttttctttccagcacttcccataatgcctaccccttattataataggaatgcaataaatacatgatgggtaaataaatgactattcacctaaactacagaaaattcagaaaagttcttctagttcacagtaatctccttccccctgaaagacagactactcacactgagaaaattcacttctctcttaaccctattcgatgttgacacgtatagctgacggagtcgtttcatagctgtgttaatattaatacacatgcaagttgccacagctctcgggctttgggggcaccatctccttccattctgaataaattgatgataaaactacttctggtcaactctgggattatcagccatatgactccttcaagttatttaatttctgaaaaactcatgagtttggttgtatggactcaattaaatactgaatataaataacatagtataacatctgacacataaaagcactatacatagtaactattattcagttttgaccttaaagtcctcagggctctgttctagcactctacattagtttgatcaaaatattcaaatctgtctgaaatgcattatgtacagaaaggacagattcatggggcatggctcaatacatattcatttaaatagaataaatgtggaatttactccatcgatgtctccctggaaaccaaacaattcagaaggtggtgcagaaagatagacggagaaataaagaatacagtcctgctctaggtttagcaatatttagtcatggacagattacatatttacaaataatttacactctagaaagaatgaaaaaaacaaacataaagaaaagtgtttagatttctgtccatgttattcctgtacctgaaatggtttgccttcaactgttttgtggccagttcattcatcatgtttagctttttcagagagccttctctaactaatctagatggtggagtgatatggtttggaccagtgtccccgctcaaatcgcgtatcgaactgtaatccccagtgttggaggtgggacctggtgggagggattggatcatgagggcagtttctaatggtgtagcaccatccccctggtgctgtttcccaactgagttctcacaggatctggtttaaaatgtgtggcacctacccgctctctctctgtttctcctgctccggcggtgtaagaagtgtctgcttccccttcgccttcctccatgattgtaagtttcctgaggcatccccagccatgcttcctgtacaggctgtggaactgtgagccaattaggcctttctttataaattattctgtctcaggtatttctttatagcagtgcgagaatggactaatacgtggaaccttgataaattattatctaatattacatcctattcattttatctatagtactgtacattttttgttgtttttattactattttgctatactcatttcttctgggtttcttctactagtgtagaatctagtgaggacaggaacaaattactacacttctggcatgtaccagaaggcttgacacacaaaaggtagtcaattaacacttgttaaatatatcaattaaataaagaacagtgttcagcaaaatacagtcaaggagatttgaagaaattctttaaaaatatttgaaaaattgttttgctaaatcatatccagacaactttaggatcacaataaaaaatgattaaaaaaaactgtattaccctttgttaatgtaaaaatgagcagattttgtatcctctctctcacatttgcaaatcagtaattatgtgagccaaagggagagtgtcagattggcatagtggaaaaataatcacaaagatcctggattcaaggaaatctgatgtttttctctgtttttttttccaattgtaatgtcggcaaagtcactgaactctctcggccttgtctcctcctctgtgacctggtaggcatgaaataaaccttgagaaccctgcagtcttttctactattactttgattttcatttctctagtactgttttttaactcactcaaaaacagtgcaacttccacttgcttttaataaatagaagcacaaagtaactttgtgacttttgctaatgttcttctaactccattttactatcagctctcatcttaggaggactggggagaaaaaaacttggtgatttttcccaacgctgacagatcttgaggtgtgaacttcacagagagaaacctgtgcatatttaatagaaataaaccaagaagttaattttaaaaacatgtttaattctccctgtggaaatcaacacctgccccttcgctgcttaatatcgttattatgatgagtttggaagttctgaatagatgcagccatgcttattactaggaaaaatgtgatagccatgttcaatagagaataaagttgtcgaccccaaatgacagacctgcatgtagatttcccataagaccatctttatgtccagtaaaagacagccaagtccccctttaacaggcagcactcttggcagagacagtagactattgcctggtttgtcactccaagggcatatttgaattgcattctgttgactgattgtttaaatataactcataaaagtttatcctccttgagacattcagtactttgaccctgacctcagttccctatcactttcctagcttcagctttttctgtgtccaaacaaaatgacctcagtaacagacatcctcacagccacttttgattcttgcttcttttggacattttacagatcctctatgttaagtccaatcatttcttctgtcactactgctcccatgtttaaagcatatctaggactatggtcctagagttatgcccgattgctgtacttcacatttatggtttccagcctcagctaagccttcatctctataccttttaagacatggctctaaataatgattgtggtgtttactgcattgtgtacatacaacacgtcagggtctgtatgctgcattttacactaagtatctttttcagtactttggatgccctgtgaggtaaaaatgaggctgaggaaactgaggcaaagaaataagaggttacaaaatttgtcttgttttatacaggtagaaaatgccaaacgagttgcacactctggtttctctcacacctacgcccctgcttacaagaagcactcgatcagctccttcctctctatgctgagacagttggcaaagtgtaagggtggaggttctggcaaagaaattcttaaagcacgtgtcgaaaaaatatgtatgtgtttaaaaacacatcagcctaatggagaaatcccagttaatatttatttttgtctacttttataactaatgcatgatggctgtaaaaaatttggaaaatgcataaaatatatatatatatatatatatataaagaaaaaaagaaaatcattcataatctcactacccagaggggaccaccattaacatctgattctttgcaatgttaaataatttaacatctttaaataatttgacatttttaaacaaaaggcaacttaattattatttatataattgatatataattgtgatatatatataatacaaatacacaggcatttggaaaatatttataactcagggaactaatattttgaactaccaatacatgatgttacaaaattatgaaagaataaaatatccactcaaaatgcaagatagaccaacagttttcatataataaagcacaaaagatttaccaatatggtttcagattccacattgtgaataactttgaagatgctaccaaaatgttggtattatctcaaagaaaaatatacagaatttcctgaaagctaattgaagttgtctgcctcttccaactacatatgtgtatacatccaggctttcttcatctacttcaatcaaaacaaaatatctcaacagattgaataaagaagcaggtatgggagtccaactatcttctactaaaccagacattaaaatgttaaattatattaaaacataaatgttaaaatgatatcaaaccaatggcaaccttctcaaagttttgaaaatatatggatttttacaaataagtaatatatcatttacatgcaataggtttatctttaaataaattgacaaataaatatattttaatttaaattttaatttctaatttgataaatatagggagatagagtatacacaaactgaagttaattgggtcctcaacaattttgaaatatataaaaggtcctacattcaaaacctttgagaaccatgatctaaaagaaatgcacggccaggcgtggtggctcacgcctgtaatcccagcactttggtaggccaaggtgggtggatcatgatgtcaaaagatcgagacaatcctgtccaacatggtgaaaccccatctctactaaaatacaaaaaattagccggctgtggtggtgcactcctatagtcccagctaataggtaggctgagtcaggggaatcgcttgaacccaggaggcggaggttgaagtgagctgagattgcaccactgcactccagcttggtgacagagcgagactccatctcaaaaaaaaaaaaaaaaaaaaaggaaaaacagaaaaagaaaaaaaagaaatgcacataccagtcctcagagagaggtgtttatcacagcactgaccacagagttagcctacgtattgatcacaatgtgactagataagtaataatcataatactttatgcagtctttaccatgtccccttgttgttctaaacgttttgcttattatatgattaagtcatgtaattgttacaacaaacttatgaggaaggcatgactattacttatattttataggtgagaaagtgagccctgagatgttcatgacttgctggtaagcagtggaggccacaatttaagcccacagtcttacattaaagcctatgtgcttaatcactctgctatgggagttcctctagaatgtggtatttgaatggaacaaagcagcatgcagtagtcagaaaccataggtgaggactgcatagcctcgcatgggtaaggtgccttacaaataatgtcattttttaaaatgtgggaagaggggggttgtttgtatggtagaaataaagagatgatcaaagtatgtcacaaattgaagtttattgctatataacgtggtttgaatgtctgtcccctccaaaattcatgttgaaatctaattgccactttaacagtattaagaagtgggatctttttttttttttttttttttttttgaaacggagtcttgctctatcatcctggctggagtgcggtggctcaatctcagctcactgcaacctccgccttccgggttcaagcgattctcctgcctcagcctcctgagtagctgggactacaagagcccatcaccatgcccgcctaattttggtatttttagtagaaatggggtttcaccatattggccaggctgttctcttactcctgaccttgtgatccccccacctcggcctcccaaaatgctgggattacaggcatgagccactacgcccagccaagaaatgagatctttaaaagtgattaggccgtgagggttgggtggaattaatgtcattataaaagggcaagttacaccccattttgtcttttttcctcctaccttccaccatgtgaaaacatggtgtggtgttcctcccctcctgaggatgcagtgttcaaggtaccatcttaaaatcagaatcaccaaaccaatagtgccttcgtgttggccttcacagcctccagaactgtgagccaaagaatctctgtttataaattaccaagtttgtggtattctgttgtagtagcaaaaaatagaccaagacatcatataagaagaaatttttttttccttaggttcacaatacttaaagagacgaggaataggaagaacaaatctcacagggaatatgcttgatagatgaggtacattgactacacggtgagtgaattccaaaattactgaagtctaatgggtcaattaggatggaagcaggcctctgtagaaagtaaagtctagttaaaatttgaggtatatatttacataagtggttctcaggtgagactgtcatgactgacaaagcagagatcttagattacaggcaaggtgactggtgttggcagggcttcagagattagctcaaaggctaacagggtgcagctctgtcagggcggagggctcagtcttccgagaagcagctgacagtgtagccctgggtcagcatatgtagggaggtagctcacagagtgtagactaccatgttctaagctctcagattgtgtgtgtgtgtatatatatatatatatatacacatatgtgtgtgtgtgtgtatatatatataatatacaatatcatgtattggtagtttgaaatattagttccctgagttataaatatcttccaaatgccaaatatatatatatagaagtccagtggttgaaatcagtaactcacagatggggtatgataaggctaaggtgtggtgtcacattcctgagggcaggggaagatcactccaagttctcacatatggagtaggataagacgtcacatttttgagaggctgaggaaatacacttcaagttcttatcacagcaaaacatatatcgctcacatagcagagtacatgtttggaatcatttcaaagctacatgacaggagagaattgtatcgctatgactttatagcaaaataccacttgtgcctatgttgaaggcacataaaacagcaccatatattttcaaggataaacaagtatctcaataaatttgtagaaggtgaattggaaagatacttactagttgctccagacgacttctgttggggaaaataaatggactagaaaataagcagatgaaaaatataaacaaaatagaaaggcccttcacaaaatgatactgataatatgcagtgaactgaatattattgttaatttaatttttataccaaagttagcaagaacaatgaaaatcacatctacccaatctcccacccctcataaaaacataacctacaattgtcttgaagaaagagattctcctctctctgccatagtgacaggtatatgcccaactaactgtggaaaacagttctttctttcaaccttactcatcaccctcacggtctgtttatgaggctctcctccaccagccagaaaggatgacgtgccatacctgcaaaacttatacagcatcaacagaatgaatctttccaacaagccgaaacattgagtattgtggcacagaatatgccccacccattactcaatctagatatccttttattccaccgtctcatgattttctttttcctggaaaacaaaagtatttctttcatagcccagctagcacgataaatcagcgagtcagaattctagctttgttgtaaggttttgcgaatatctgatcctcttattttgtacttttctatttcctaggcaaatctgagtatttcacccagttttccttaactaggcattgaaaactcagtttttttcttacaaaccttcatgtcttcctgctcatttgcacagtcttatcttgcacctcctataaaatggagaaacttgacattaaaacgtaatttttattacattttgagggattcccagagaatttttccccaatctccttaggtagggacttctttactatagttcccacacacatctatcaccctcccctacttctagacaattttgggaggcattcctcccttctcccaccaatcaaggagccaggtatctctaccgagctgagtaactgtagaaatctttctgcttccagtttctagcaccagcattacctgaggggactgattcctagaggtcaaagacaaatgctgggtttggtgcctgcgttgtttttaggcttctttttcttcctggcttcctcctccctgcacaggttcaaagttgtttctttcctcataactgtatctgaaaaagcaaggcccattctactagaagaccttgtattttccgtggagaatccacagagtgagtagtttgaaagtgcggataggaggagggctcttcaggctgtggctgctgagtgagagcgaggtgttcccaaattggtgcacacatttgtggaaatgagacaaagtttctaagtcctgagctgcacccttaattcttcacacacatgttgatttttaaagttaaacctacaacttcctccttgcatagggccaaacaagcatggtattaagagaggaagacgaatagtgttctaaacatttcccaggacttcagttccataaggtatcatctggtcgaattcttatgtagaagttgtctggttcctcagtttcacccattctatggccagcccagacttccccaggtaggatttatgccccttcttccagaaagcaggacttctcctgtcctaaatccttcattctctccatctagcagtcaaataaatcccaggaaatacacggagtgttccttgtcctgaagtataatacccatccttgtaatatactacatggccttatctttatccttacatttaggaatttctaatatttctccctcttttgttgcttcaggtgccaaataaaacaaaatgcttcatcaaaccaatgacatacatcatgtgtcaagtatctgcctcaaagcaacttgttgcatactctttacttctatatacacgctcgcagtttcttaatatttactagaaatcagaatgcaattctttaatttttatgttcccctttgtacatcatgtgtcacctttaattctttgttcatcttagttaccatgaagtttttcatttacttacttgcttcgtagttactttgaagagtaaaacgtagatgagatgcagtatactgttaaggttttctaataccacggggagcgtttcatttgtttttaaagtttaggccattgcaagaaatttgctccttaaaattctactgacacttattcttaatttttttaagagacagctgtaacattgtttacaaacgtataaataccatcccagcgagaaactagctttgtgcttctgtcataaaagagacacaggtttctaacaggaaatggaaaagggagaactactgagtcaagtgcaaactcccagccaggcagagagcagctgactctgtagaaccgtcccttcccgtctccctccacaccttgcctcctccaggcccaaccccattccaccagcaccccgccccaggcgcactggctaggactggaaggcaaggactaaggtgaaagctgactgcccgcaccgccccaggcgcactgggtaggactgaaaggcagggactaaggtgacagctgactctgccggggcggagtgcgtgtcctcccaccgtgctggcgctgaactgactgtccgctgccaagggaagtgacagccgcagccgggctctcagccagcggccaggcgccccgcggaccatgctctccagtacgcagaacgcgggcggctcctatcagcgggtccgcggggcgcttgatacacaggtaaagttctctggtccttaggggagaggagaggcgggtcgtggggaccactgtgggtgcaggagtggaagtggggagaggtgagtcctcgaaccctgaacgtggacggacgagcccttgtttcagtagccaacacacacgggacagacagaccggcgtacacactcaatcctcagagcagagatcagagatcagggtaggtgcaacttgaaccagaggagctcagtcttggtagggctggaggagaggaagaggcatctttgtttgaagagataagtaactcccccataagcagaaagcgtggatgggcctgtcatcgctgaaggaacacaggttggagcagaattctactaccattgagtgatcccattaaaaccgcagagcattggggattaataacactcagtgtggattttgggacccaggtctggggcaaatccagaaacttcagacacttaattgtgctctcctctggcgcactataactcatgcttctacaatgggagtcacgtgctaaggcggtagtcagagaaatgagccctacagttgttgtgtattagcaacaattcccctaacaaaagttccatttgtttcacttatcatcactatacaagacatggacttagaaacagccctgttgtcctaacaaagaaaaaatatataattccgattcaggggacttgttctaatcctggcttttttagtaactctgagtgtcaaatatatgtgacatctattttgatcacatacaaaatcaaactataaatttatttaaaattaagttatatgtaaagtacttttataaaaatctataagatagaagggctgaataagttccttgaaaatgtgaaaaagctccatcactatagcatgcctctttttactgtaccgtagagatggcaggctcaattgcgcaaactggtttaatatcattagtgtaacagccaaggtgatcaaaggcagtaaattataaacttgtagttgaaaaattataaaactcaattttgtcaccccaaattttagtcgactcttcctttagtattcaaacaccgtttgtttccttgattattattcaactttgatagccttcatagatcaggaatccacttaaacaaggttgaaaatattcattttaatttcattctctatttgttatttctatgatggcaatttttaaaaaaagttggtggtagccaggcacagtggctcacgcctgtaatcccagcactctgggaggccaggcatggaggcgtgctcatgcagtcccagctacttggtggggggctgaggtggaaggattacttgagcttgagagattgaggctgcagtgagccatgttcgctccacttcactgaagcctgagcaacacagtgagacactatctcaaaaaaaaattgatggcttcaaaatgtataaaaaaacctctgtttacttacatattgacttcatatttttaatacaacagatctcaggtaaaaatccctatgtaactataagctaagaacatacctttttaattgaatttttatggctaacatggtgactgtgaatagattcttctaaatattttttgttggtagtgattagcatccatccattcattcagtcagtcatccgaaacatgtttattatgagctggccctgggccttgagaaactggagatttctccagaagctagcgatacagagataaaccaactatagtttctgtcttccagcgacactaaatctagtaagagagaagcaccttccaggaaataatgagagagttgggtaatatgagggtaaattctgtgagtgccaacctgaaggagcccttaagtcctccctgaggagtatgttaaagttgctctggtaatacagaacgtgtttcagagccttggactggagtgagaggacagaaattacaaaagacactgaaacctgaataggattgaagcacaaaagccaggagaagggaggcagaaggatgtgggcagtaggaaaggtctaagtagtgaaaaacagtgttgcatgggtacagagttgagagtgtggatttagaactggagtatagaataaactaagtggtttagatcttgtttccaatacttggttgcaagatcttaggcgagtttcttaaactctgggtgttagtttccctttctataaaataggggtgacagaaattattccaccataaaggtattttacatttagtgaaataatatacttagtacagaatttagcatcttttaagtgattaaaaaaatgtaagttttatctgtctgggcaccatggctcacaccagtaatcctagcagtttgagagtccaagaggggtggatcacctgaggtcaggagtaaaagaccagcttggccaacatggtgaaaccctgtctctactaaaaatacaaaaattagcagagcctggtggcagatgcctgtaattccagctacttgggaggctgaggcaggagagtcgcatgaacctgggaggcagaggatgcagtaagccaagattgcaccactgcactccagcctgggtgacagagcaagactccatgtcaaaaaaaaaaaaaaagtaagtttttttttttttttaatttccagaagtgttcccttctccatgagcatctactttcattttccagtaacttcctccactattcccaaaatccccctataaaatccacataggaagcttctgaaattaggcattatgggatatcagtaaacacagcaatctgtcacacaaaccgtattgccatgaggtcacatctcaacattaaacccaaggaagtttgaaaacagtacacttcagaaccccagctgtgctatgatccagtggtctaaatacttattgttttctgccataaaccagaagtaacaggacctccattctagtgaaaattgctcttaagtcagcaatgtcaaggtatgtttatggaatgcctactataagctcaatagtaaataaatacaatagataataaaacagcttaaacaaggtctgtagtggacatggggacacacgaaatgagaaactcacttggggtcaattatgtcagcagaccagaattgctgtcagattgagaacaaatgagttagaaagatgataaatatttaatggagaagatgggagtaaattagaacattcaaagatactcagaattgtcatgttctatttttctacatagaaattactatgtgcaatatataatcaactcaatgagatccatgatatgaattcaataattatgaatgtattgaaaagtcatttgcacattcttggtgcttggtaaggattaactcccttcatcagacttttttttttttttttaaacctggctgctattccttctgggaagtaaagtatggttggactttactgtgcttcagcataagatacctggttcacatctaaggaggctatgtaccagaaaatataaagggcgtcacataagatgctttcacatgaaaaaatggtcctagagggaatgttaaaccaagtaccgagttcttagtctgctaaagtagccatctgcagtagctttgcaaggcttaggtgcctcaaacaacaaccatgctatttagttaattattctttgggtcagttggattgtgtcctggtttgggtcagtttgacggataactcctgcgctcttttatgcataggattgttgcgagaactaaatacaatgacagtaattctacaatgattgtagaatcagctggcagatgggctggtaggcagataatctagaaccacgttattcctatatctggcagttttcaagctattggcctggtaatagaccatcagatgagtgccttagttctcctccacatgatctgtcatccttcagcagcctagctccagctcagtcacatggtgcactcagtgtcctaagcgcagcaggagccaaagcattaaggcttcttgaggcttagaatttcaatgtcactcctgttgtatttctatgaccaaaacaagacacaatgtcagcccagatacaaggaatgggaaatagattccacctcttgatgggaaaagctgcaaagaattggtagccatttacagttttccacagaaatatatgtgtttcggctatcaatccgatcctttcattggtagcaaattatcacattagcaactccctgtgaaatttgaacttatgacataaaatatgtcctccaggttaattagagaatttttagaatattttttccaataatttatgtacttgttttttaaataatatgttggtaacaatagtgatgacaattttattgttcatatatttgagtcattgttttgggctaatggtgtgataagtattttatatttatcattatattagttcttgcaacaatcttataatgataaatgccattttggtaaattgtgtatatcttaaatgatttatactatataatttgttataacacagagaacacatttggcgtcaaatacattttctcatctctactttgggcattttgttgtatacgatgaaatttggatttagtcattccttctagcttcagaattttttaaattggtaaacactgattatggaatcagaactgagttagagaagatcactaggaaatttcttaaatgttggacagtttctaaaaatcaaaattaacttggtgaccagtcttactttttaaaatgcaaagagattgatgctgactataaaaacataaaatggttatttttgagtcctctatttttaaacctcttttctcttggttaaaccaacacagtaaatgggaaaactttatggaaatgttaaaacccaccccaagatatcgtgtaattgtgacaaatatgtaattgtgtatataatttttaaaatatgtaaacacacacagaagtataccaaataactatgatattctcttttctatttttcagaaaaagaaaactatctttagcaatttagatgcttacatttatcttatatatacatatacatatataatacatatgggtataaattattcacttatactgtcatataattgtgttaatgtaaatagacaatatgggctaagttcaaagaactgtcccactgtatgtgtacatatatatgtatatgtatgtatattgtatatgtatatatgtatacaaatacatataattgtaaatttacagttctaaaatctctctatgtatgtatatgtacatatacatacaattttccttcccaacatgatttactgctacatgcaccatcgtaatattgagagaaatcttgaaattcctctagtccaaccaccatacaagaatatcttcacttaactatatttcttaagaattatgataccaacatatccgtaactcttagtagaataaatcatgtcagatttacccctgacaaaaaatatttcaaatataaatttaaaatatttactttatacactactctctatattttttcttttcagaaatgcagtccagagaaaagtgcctcatttttcagtaaagtgacatattcctggtttagcaggtaggaattttactaatatatttgtagtgtaccacactgaaaaagatcccaagggaaatgacacctgaatttcctttaatctcaaagtgaatagttgtacaaagttgtctcatattacttattacacagaaatcacaggtaaaaacatactaaatagttccacagataacagtactaatattcctccaatatgtctatatctttgtcgggttttcatctcattaccactagggaagaacagaaaaatgaacttcttttttagcatcaagtatatgctatccactttgtgtttattatttcatttaattctcctccaagtgctatgagaaaggcatttgcatgagaaaaatttaggctcaggaaacgaaagcacctgtccattgatacccatgtaggagtaagtatgtgtcttaaaccaatttctgatgagttcatgtttcaagctttatttttgctatgtcaatctactttttattagaaatgctctcttttatactaatatatgctattattaaaaaacacacacacacagccctaagcattttatatgacatatattatggtttttctcatagaataattcacccataacatatgttgagggctcagaatttcttcaggagataccattgtgaactctgatttttaacacagaaattaaatggtattgaatgggaagagttgatgttttcttattttataaattcagaagctttctttagaaatgtatttctttttcccccataacagaaattccataataatatgaagttaaatttgtgtttctagctttatgccccttgctctgcagttcacagaaacaaaactgctcaattttatctacagatatgttcccaagagtggattaatcttttaaaaaatgattaggtactagataccccaaactcaaatagtctttaaaaatgcagagataaatgagttagtttctgtcttctaggaattcatagtagaattaaaaagattaaaaagtataccaccattacaaaaaaagggaaaaggcaacataagcgtaattgacaaacacaaattttcagtaatatcatctaatcaagtttgcacaattagagactatttcacagataccaatgctttcacttaacatttaaagatgtgtaggagtgagaaacgtggtatcccaaattgagcaaatactatgtgaaaaccatacaataaaaggtgggaaagaactggctgtgaagttcagatgtggtgaaaaactgtgggttcagactgagaaatttttaatttttgagatacttattgaaggggtgggttgcccctccacacctgcggatgtttctcgttaggtggaacgagagactaggaaaagaaagagacacagagacaaagtatagagaaagaaaaaggggctcaggggaccggcattcagcatacggaggatccacgccggcaccagcctctgaattcccttagtatttattgatcattatcgggcgtttcccggagagggggacgtggcaggataatacgataatagtggagagaaggtcagaaggtaaacacgtgaacaaatgtctctgcatcataaacaaggtaaagaaaaaactgctgtgcttttgatatgcatatacataaacatctcaatgccttaaggagcagtattgctgccatcatgtcccacctccagccctaaggcagttttcccctatctcagtagatggaatatacaatcggctttacaccgagacattccattgccccgggacgggcaggagacagaagccttcctcttgtctcaactgaaaagaggcgttccttcctcttttactaatactcctcagcgcagaccctttactggtgtcaggctgggggacggtcaggtctttcccttcccacgaggccatatttcagactatcacatggggagaaaccttggacaatacctggctttcctaggcagaggtccctgtggccttctgcagtattttgtgtcgctgggtacttgagattagggagtggtgatgactcttaacgagcatgctgccttccagcatttgtttaacaaagcacaccctgcacaacccttaatccatttaaccctgagtggacacagcacatgtttcagggagcacagggttaggggtagggttacagattaacagcatctcaaggcagaagaatttttcttagtacagaacaaaatggagtctcctatgtctacttctttctacacagacacagtaacaatctgatctgtctttcttttccccacacttatgaagcatcacatgtacaggagtttggatatgtggcttccaggcttagaataaacctttgactatagatatggatttgggagtcactgactagaggacagtagttgaaaccatgcgtatgaatgagattgcccagaggaagaacctattgaataggctgaacaaatggaacattggtaatcctcagtatttaaatggcaagagaaagaggagtctacaaaaaaagctaagtaaaggtgttcagaatatattataagagaagtatctgatgaaatagtatgagtgacaggtaagaaaagagaaactgtcaagaaaggagaaaaataaagtggtcaatagggccaaatactgcaaaggggtgaattaaaataataactaaatattctccattaaatttggcaacatgaagatcactggggagtttttcaaagcaattgaagtagaaaatgtatatacttgtgagcaaatacttgggcagaaggggttaaattgtgataaaatttccaagttacacaaatctaagaatctcttaaagaggatggcaaaactatgtaacattaagcagcacactagaaaagagaaagcatagctagaaatgtaaatgtgagctatttacagttaatgattttaatgcttcaaatttgtataggtatagaaatgttttccaaacctgaattttgtttatgggggagttgagaggaagagtgacacctaccccagctttaaaaaattccagtctcgggcccggcgcggtggcgcacacctgtaatcccagcactttgggaggcctaggcgggcgcatcgtgaggtcaggagatggagaccatcctggctaacacagtgaaaccccgtctccccaaaaaaatatataaaaaatgagctgggtgtggtggcgggcgcctgtagtcccagctacttgggaggctgaggcaggagaatggcgtgaacctgggaggcggagctggcagtgagctgagatcgcgccactgcactccagccagggcgacagagcgagactccatctcaaaaaaaataaacaaataaaaataaaaaataaaaaattctagtctcattttaaatccataggtatcacagaatttaagtaatgcaaataaaattaattttaaataaatgtagttttaaactttgattatcaaactataaaaactatatgcatatgtattaaatattgcaaacattattttagcattcctaaagacgctgaaattaaatttaataagcaagataagacatagcaaatcttcaaatatgacaacctagtattttgaaatccatatcttaagtcaatcaaacaaaccatcaagctctgtgaatatcacatttattttctgtttaatttgaatatctcataattagatacaaaatattttcataggatgttgttatccagaactgtcattggcatggatctaatctgatttcttatgtggtgactaaacaattgtatttgaaacctaactattgtttaagagaatgtccctttgaagacaaagattaattgtattctcctatctgtttttggagttacagaatagtgtcaaattatttcctagaacaaattcaagcatcaataattgtatgaataactcaattaaaatgtgctcagatgacacaataattacaaaattatatacttatgagccttaattcctaagacaatagctatctagatcattctgatgatcaaataattaccaagcctttattagcaaatataatctgtcaccagtgtataataatcatggccagagatatacatggaaaaatctagtaagagttttcataggtcacaatagtgtcattattttaaccagatacactattcaatatgtcctttttctcacatactaaaaaaatttgtacattaaacaactttctcccaacctataatttttggccagattgatttctttccttttcccataacataatacctctttccagaaatggttttttgttttgttttgtttttgttttgagatggagtcttgctcagtcgcccaggctggagtgcagtggtgcgatctcggctcactgcaagctccgccttccgggttcacgccattctcctgcctcggcctcccgagtagctgggactacaggcatccgccactacacccggctaatttttttttgtatttttagtagagacggggtttcaccatgttagccaggatagtctggatctcctgacctcgtgatccacccgccttggcctccctccagaaatgttttaaaaggttatttatagcaataaaattgataatgctactatatatttgtactttctaagtattcaaatattactcatctataaaagttatatttcagctcatcttcctaatagaatgccactgtttttctattctgttcacatgagttggttgagatatttatgcacatttaataattctaaatatagtcaaaattctctctaagataataaaatttaagagtggaaattgtattagtcagttctcacgttgctatgaagaaatatccgagactgggtaatttataagggaaagaggtttaattggctgacagttccacagggctggggaggtctcaggaaacttacaatcatggcagaagaagcaaacacgtccttctccacctggcagcaggaagaagtgtcaaacaaagagagaaaagcccctcataagaccatcagatctcataaaaactcgctcactatcatgagaacggcagcatggggtaaccacccctatgattcagttacctcccaccaggtccctcccatgacatgtggggattatgtgaactgcaattcaagatgagatttgggtgggaacaaagccaaaccatatcagaagtaatacatttcactgtctgctttttgctaagttagccctggtttattttacatacaaaacaccatcaccagtctctgaagttcttaatgtttaactgcctgtaaaaatgagaaattaatcctgctctgccagctttggggagttgtgagaatcaaattcattgatgtgaatgtcctttgaaaagaaacatcattctaaaaatatgagatacatgtgtaaactgtattatcgttttaggaataaagcccacaggttgatgggacctagtatgtgttacacatttcacttactgagagggccaactctgggtcctcattgtttcccaaaaagctgcctcaacatttgatttaaataaataccacttcgttatcacttccttgcttattctttttccaaactcttgtgtgggaaggtaaggccagccatgtgatcagagtctgttagaagagagcaaaagatagtggaggggaacacacatctgggaaaaaagtcaaggtagttaaaccactaagccatgagagtcacaatcaagtcagcttaagtgtcacttttagatgctgcattatttggggactcagcatgaaagcaagaggtcacttttccctgaaccgaaacctctgagttttgcacagttctaactcaaaatgctgaggcagtaaatgttattaaaaatgcttttctaaaagtcaatgcagtcttattttgaaaatgaatatttattttctggaatgaaatagaacttaatatgacaagaaagtagtttattgcttaatatgtttttaaaagtgcactgcaggaaaatgtccagcatatttgagccaacagaaacatgattacggaaaatcccttcttattacatttaaacctttttgttagatatgaattgtggtaagatattatgtattatactaaaagtaaaataaaatctagtggaatcttttgttaccatagggtttaaattcatcccagagtcaatcaattgagattatttagtaacaaggccaatgaaagcagtcccaatttggagtagtttaaggcattgttaccgcctcttcggctaatacactttatatggacagaacttaggccagtcagaaggcctggatttaaatatgggtttaatttcttattgaacaagtcatgtcaccaaagtcacaaactatatctgatttaaatcacttcagagtgagtttagcttcaagtaacagaatagccagataataatagtttaaacaaacaagtatttattttcttatgttattggaaagagggtgttactggaaataagttgttgaactattgcagaaatgttacgaaaggcccaggctaggtcggtcacagtggctcacacctgcaatcccagcactttgggaggccaaggcaggctgattacttgaggccaggagttcaagcccagcctggccaacagggcaaaaccctgtctctactaaaagtagaaaaactagccaggaatggtggtgtgtgcctgtaatctcagctactcgggaggctgacgcatgagaattgcttgaacccaggaggcagaggttgcagtgagcagagattgctccactgcactccagcctgggcaacagagcaagagtctgtggggaaaaaaaaaaaaaaaaggctcaggcttttttagtctttctgcttcccatccttattatttggcttttttatccgtagtggcaaagatggcttttatatctcaaagcatcatggcttcaaaggacaaaagggaaagagaagggaggcaacatgttttctccttttgaagttctgtgctttcatttgaaaaagaaagttcttcctagcagatattggcttgggtattgttagccataactcagttatattattaatcccaagcacagggtaatgagagtaccaggactggtttagatcaattataattcataactctgtggctaaaataagaccttaccatgagttcaagagattttcaactgaagaaatatcagatccctgttagcagaaagacggtagagcagagctagagctgtgggtaagtacaattcattctctcccacagtaacttctgtggtaaaactacactatgcatcttgtttgcctcccagtttagacccattgttcttgcataattatttgcagtgtcacctgggataagctcattgaatggagaagggtggaaaaactaagaggctggtggagacttgccttgcttcttaaggcatcaattcagaaactgcactctcacattggctcatattctgttggtcataaggccaaggccagagcttgtgggatagggacaagtactccacatccagttgtacaatctataaagtcaagtggcaaattgtacagaaagtcctagtagaacagaagaaaattgcaaatgcagaggttggatttgttttccctccaatagaagcctaaaagccagtttgggtacttgagtggtatgggtgatattctactgggaaaatttgctatataaattttaatgagctgagtggtacatttcccaaatataagatgaataaatgaagtcagtgtttcactgaataattggatgtctaaacagcatttataaaaactataaatgattattgcacattattgacctccaggataaaactgtatgatttgtttaaacacataatctagtcattgtattttaatcaataaaataatgcaaaaatcaaagaaagtaataaatgtatgacaatttatttttaactagattatttgttttgctgtcttgtttaccttactttttcatctttagagtaattactttaggctataagagacctttggaaagagaggatctttttgaactaaaggaaagtgattccttctgcactgcgtgtcccatctttgaaaaacaatggagaaaggaagttttaaggaatcaagagaggcaaaaagtaaaggtaattaattatgaagttctataaactcctgaagtgattactgcctgacaactagataaagcttttttcaagtatgagatactattattaatatcgaaatttgtaaaatgtgtgaaatgacaatctatttttataagcataatttgttgctattgcagcccatttctgtcttcaaactactcaacattccttctctttaatgttcaggagcaaatgtgttgatatgcatgtatatatctttggctccttaccagtggtgacaaagatagcttctgtatctcagagcatcatgtctattggtcaaagcaaattatatggtggccaaaattgaagtttatgggagcaggagcagacactccacctctagcatcatatgcatatatattattttcagacttctccaaaagaaaatataatttggagataaaaactgtatttatgttaattaaatagtttcaaaactcacaaaaataataaaatgcaactattgcacttgtccctttatgccatgtggtataagtaacaccacctaccatctcaatgatatgggtcataatttcaagtttaactgatttattcctttcttattaccttattgtctttagagcaatattgttaattgtataagtagtttagttatatttcattttattaatattagttgtgtccaattttctcattgtgtctattttctttagttatgtaggtatcttgttataaagaggcacatatcaagaaaccatctctactctatgcattgtggaacacctttaaatccatcctgattcaagttgccttattcaaagtgtttgctgatattttgtccttcactagcccactcataatgaagtaagttaaagtctggtgggttttttttccctcctcacagataaatgaaaagtaagtattctaatataaaagttctaatacaaaagagtagagaaggttcttattgcaaatattattaggatgtggacatgctattagggttatctacaatataaatgggaattaggataatatagtcaatatctaataaagtcaaccctgtactaagcactgctctaaaatcttatattaattttattaagcaagggttcgccagagaaacagaaccaataggatatataagcccaaataagaggggatttattatgggaattggctctcgcaattatggaggccaagaagtcccacagtcttgcatttgcaagctagagactcaggaaagacagtggcataatgcagtctgagtccaaaggccaggtaaccttgagttctgacgtccacgggcaggagaaggtggatatttcagctccaggaaagagagctaattcactctctctttaccttcttgttctatccaggccctcaacaaattggatgaggcactatgccctgggatcatccttactcagtctactgattcaaatgctaatctcttccagaaacagcctcacagacacacccagacatctggtagatggtaaaacattatttaaatgttattaaacagaaataatgttttaccatctcttcaccagtcaagttgacacgtaaaattaaccatcacattggtaatctcatttaatctttactacactcctgcaacatagacagtattattacattcagtattacaatggcagaaacagacagaaagggtggagtaatttgtccaagtccccacagctagaaagtgccagagtcgtaattgaaatctaggaagtctcgcttgaatgtatgcgatacatattttcactacgatacttagttgtggccttttgagagttgagctttaacagccatggcaattacacacacacacaaacatacactcacacacacaattactatgtataacatatatgaacatatattattattacctaatatatgtatatttctgtgcatctctatatctagatatggacatagtaaaatgacttgaaacatttctataatatctacctgcaatggtttacaggcagacaatgaaattgatcttttgactgtgccacctttttcaaggaaaccttgacttatacctagctgtcatatgaaggaaatgcaaagaaacatatattttattaactggtgattatatttttactattgaaaaatttccaagttgttagagtttttaataaccatttaattcatgaaaatatcattaatcctgcattacttagatcccatatgatattcaggaatatattcattcaatatttattgagcacctatgcatgccaaaactgttctaggtcgactgcggggacagaacaaaaatcaaaacaaagaacctgctctgatgacacttagaggggagagatgaaagccaaacaaatgaataaacataaatgataccatcagtgcttaggaacaaagtaaagtagggtaagggaatgccagtctgaggagttagaagttaccgttttatgtaaggtaattatgaaagacattggtgataaggtgacatttggtcacagttctgaaggaagttagggaggaagccaagaaaatatctattgtgattaaaggtagcaggaagggcaaaagtcatgaagaagctcatgcttgatatctctgagggcctgcaaggaggcaaagtgaggttggagcagagagctggaaaggtaagactgaggtcagaaaggtgcagagatgaaaagattttgaaggaccttatgaaatatgatgggaatattggcttttagtccacattagcagggaagaatttggaagattttgagcaaaaaaacaatgatctgcttagacttaagtcttataggaatgactctggctgctatgtggggaataaaatcaagacgtgcaagagtggaagaagaaacaccagttagaagtttgtttgcgataatccaagcaaaagttaatggtggcttcaactaggtagtagcaataagggtgataagaagtggtcagactctggttgtgttttaaaggtagagttaacagaatatactggtggactgaatgtaggttgagagaggaagcgagaagttaaggatgccttcaaaatttttgtttagatcatcaggtaaatgagtcagcatatccttgtagtatgtcacagtatacgcccaaattgttttcaccatattgcatgtgctatatagccttttaaatttaacactattttcagtcgcattgatgcagttttaaaaaggtgaaatcatgcttaaaatattattaccagtgaacatcaggcactctgagttttagacaatgtttatagttgagggactatcagccgagatacttgtaattagaaccatccccactgtttttctgctccccagcattggccctaatcatcctgatcatgctgtcacaaacttaagaggaaataaggaaaaggagagaaaaaagaaattggttatgaataaaagtgacaataaaacatgagatataaatcaagcttaaaaaaaaaaagcagcacctgtgggccatactaaaagatcccctacttacgttctggttgtcatgtttccctgtatttgataaaacacataattttgagaaaaataaagttttaaatgtatctatgtctcgacttttctgatgaagttataccagaaaagttaattatttgatgggcctgccatgtgaaaaccagaaaataacctcgtactcacaagccagtggaagggattcctgattttactaaaaaaaaaaaaaaaaaagagagggcggggacaaatatcaaattaagcaagtaaagaaaaagaacaggtaagagtgtgtgtgtgtgtgtgtgtgtgtaacactttgacaatactaaactctcataagcatttaacacttcagatgtttaacatttctgcccctttctcaatttttatgacgtgcaggcaaattatcattttctgtgaacacagctcagattttggctggaatggctatggctatgcagtggcacttcttgttgtagtctttttgcaaactctgattcttcagcaatatcaacgttttaacatgctcacctcagcaaaagttaagacagctgtaaatggactgatctacaaaaaggtaaaaattccaaggaatccccattcctgggtggactactcccttatgtgctttaaaataagggggctagaaaaataggggagtatatcaaaaagtccttaggaaatcctttgtatatacatttgttttgctttaaaagaactttggctcatcgatactggttgcattaatttctctttagtacatgttctctctctctctttctctctctctggtctttacaacttctagtcagccctaatccattacattaaagataatctttgtttaatcttatgccacctaactgctactcacaaagtgagtggaattgaatattttcatggttttctatatgtatgcatcaataaaagctctccttttcacaatattattttcagtcttcatattaccttttcctttctcctctgggaacttcatttttatgcaataaagtcactcatttttatactgtcattccccatttctctcttattctaagtcctgcctcccaaagttggctgatctttattcctggcataaccctaaagtttaattagtcctttttttaaacactacctctttaccatggagggtcttttatttacaacataattataaacagttaaagagcttcctcccgcccctagttatcaagtaattatcccagcaacaagtgtactttgttcccgctttgcactctgatttaaattgtaggttcatcaggatttggaatagaaatttatttagctgttgtatccatatcatacaagacaatgacttttatactttattaaagttggattactgaatgaatgaatgaatgaatgaacaagtgagcccctgctttccaaataaattgagggaagtgttagcatacataacaaacatgtggaactaaatgcagattttataggagatcagatgaacagaaaatctacaaggggttgtacatagttaaggaagttttcacataggaagtcttgaaaaggtctttgagagagctattgactttgtgtaaggggaaggaagtgttataatttgggctgagctggacataaagcattacaggccattttgatctttgggccacaatgggggcatgaagtggttttatggatcttggaaagccaagtacaaattgagcagtaaatggtaactgaacttgcagcagagtttagctctgtagaactcagtccacatacaggattagaggggctgtcccagtcctaattctagaggcagtatgtgctgcctccaatatggaataaagatacagaagaatctagaaactggtttgaatgctaacacttgttttgttatatagtccatatggaacaggattttattccatgattagagcattggagtttagacatgagatgtaggtggatttacaaacataaaagactaaactgccatgaaagagtgaatgcagaagcataaaatgtggagcacggatcactttcagagcaataaaccactctgtgtgatagtataatcgtgaatgtatgtcattatacatttgtacaaacccacagaatgtacaacaccaagagtgaaccctaatgcaaactatagacttcgggtgataatgatgtgtcaatgtggtttcatcggctgtgacaaatgtacccctctgtggaggatgttgataatgggggaggctatgaacatgcaggataaggagtatatgagatttctttgtacctttctctcagttttgctgtgaacctaaaactgctctaaataaaagcagtcctttgtaggggcagaaaggtgtaatacctcttttcatccatcataagagttgcagtggacattcctatagcaaaagacaggttgaaaagagaaaaataaaacaagttaatttaattaaaatttacttcttcagaagtaagacccaatgatccagggaaaactgtctattcttatgcttaggttctatagagaatagacagcagtgtagaaatgtgatcagacaaaagggtgtgatctaatagtaagggactgagaggagacacccagcatggcctttccattcaaattcttcctggcctctctgtatagtattcctttccctggatattggataggacccttctggaatgatggtcttcaagagagacgggaaaaagtgttacctttctaagttaaatgaggcttgtttgagaggggttctagttctgtgactcacttttggaaaaaggaaagaaagaggagtgggagacaaaagggctggagagggtcagagagactttgcttctgaggccttcccaatgttcttcagttccaagtgctcagcatgccaaggtgccacattttggggtatcatgttctgagtccaaacaccttaaatgtaaaaacagaatggactgaagtagaaattagagcaagctgttagaaattaaaaagagaaacaagtgtcatcattgagtcttgcaaagtgggaatagtgactacaggggatagaccttgtatagttccttaaagattgtttaagattaagggacactgaaggatcaaaggagtattgctatcaagcctactctgtggaccctgtagtggatattacagtgtaacaggagacacaagtctctctccatgaggtgaacagggattgttaaatttcccttcttctttataggttttagaattccagatgactcatacttctctgaaattggccatacttcatcagggacttgtgactagaatagggtaaagttggtctcaggtccttttcttggtgaggggttgtattagtctatgttcacactgctatatagatactatctgatactgggtaatttacaaaggaaagaggtttaattgactcatagttctgcgtggctgggtaggcctcaggaagcttacgatcatggtggaaggtgaaggggaagcaaggcacttcttacttggcagcaagagagagagggagagcaaacgggaaagtgccacttttaagccatcagatctcatgagaactcactcactaccatgagaacagcacaggggaaactgcctccatgatccaatcacctctcaccaggtccctccctcgccacatagggtttataattccagatgagatttgggtggggacacagaacaaaactatatcaggggtgcaggtatcaggatgtgctttgttccttatccatccacaattactagtgtaagtttggaataaagttcagggaatatcatttttaggtttgcaagaaagaacatgggcctccttccacttgatgactttaagattctgtggatctcaaaactcagattctgttaccccttagttcacaggttcaagctccatgaaaattcttggagactaaaaaacaaaacatgactccaaagaaatcattatatcaaaaagataacttcacttgtttgttgatcacagcactattcacaacagcaaggatatgaaatcaacctaagtgtccatcaacagatgatcagataaagaaaatgtgctgtatatgtctgtgtacacacacacacatgcacacacacacgcacacacacacacatacacatatatatacacacacacacaccatggaatactactcagtcatacaaaaggaatggaatcatgtcacatttgctagatcatggatagaattggaggccattatcttaagtgaaataactcagaaacagaaagtcagataccacatgttctcatttataagtggaagctaaataacgtgtacacatggacgtacagagtgaaataatagatattggagactaggatggctgggagggtgggtaatggtaagggatgagaaacaccatgacccaatatagccatgtaacaaaactgcatttgtacccccaaatctataaattaaaaataaaaaaaaaagaactttttttaaaaagaagcatcaattaaacctgggtttaatgtgggcagtctgggggaattcctccattaagcgttgtccaatagagtttttgtgattttttttaaaaatgttctgtatttgcactgtacagtatggtaggcactaatcacatatggctgctgagcccttgaaatgtaactagtacaactaaagaagtccatttttaattttaattaatttaaattttaatataataaccacatctggctagtggctaccatattggctagtatggtgtctacactgtctccatttgtagtttaaaggtgttatcttactttaattatggtaattataaaacgcaaaaaaaatggtaaaaatttagttacattcttaaagtagagatacttaagtatagtcaggagaaggagagacagaatccaaatcctgcccttagagtcagaaagagaatcttggcatatttattggcacacaagggattgaagaatgcattcttataagtgttatgtgctgccaccttcagctttaccatttctcatacttctggttgaagatcattgggatgtgaatttttggagcccttgcggctctacattaaatgatgtgtattacttgcagctaggatggtcaggaaaagtgtcatggttaatattgcatgatgtgggtcatggaataatggaaggatacattgcatggggtaaaggctctgatgttagaataacttgggagaaaaaaagtacagaaatgcgtacaaggcctgctcagaaaatggtgagtagattaaatcggcttgagacaatgttttatgtccagaatggtggggagagatagtaaaggcagaagggattgcttaaaaaaaaaaaaaaacttgaaagctatatttttaaaatgtacctgaattctataggaaattgggacccagctgagccataagatggatgatcaggacaaaaggattaaaaacagatgagatgggaaagaaggagacccttagagctagtgcaataattgaagaaataaagaaatgaagaactagggtcatggcatggagtctagaaagtaacaaatatataagaaggagaatgtgaaattgcaaaacaaatttcatcgtcagttcataaaatgaaatattaaggactgaactagtgataatcaagattgtggggcttggaactatatctggttcatgttgattttcttagagcataattcaattagggaaatgaatgaagttttaaaaacagatgagtcacacagctttatgtgtgtgtgtgagtgtgtgggtgtattaagatgtgtatgatatgaaaatactgtagaaaacaaatctaaaacttggatagaattttaaagtaacagcttcttagaaaagtgattaggtaacaaatgacctggctaattttcattttgattgaagagtacttagaagcttccaaacttttaacattgttttaaatttcctttcttttatttgtttatttacttatttttattttttatttatttattatttatttatttatttattcattcatttatttatttatttattttgagacggagtctcgctctgtcacccaggctggagtgcagcggcgcgatctcggctcactgcaagctccgcctgggattacaggcgtgagtcaccgcgcccggcagatttcctttcttttcacctgaatcacatttttcctcctgtaacagactaaagtacttcctaccagacaattctagaaatgttacaccatccgctgtaattggcacatattacagtattctttcaagttgtttcgtataacaaaaaggcagcttagattgtataatttagcaataaatggtaactaaattgtccttcgtggcttgtgaattttgtctctttcagaaatgtaaaggcttatttggcagaaaaaaatattgaagaaaaaaaacccaaaaatttgaaaaaattcccctagtgttagaaatgccatacaaacaaccttcaattatataatacctttcagtattttctctaatagtctaaaagcaattgattttttcttttattattgtaaaaaaagtaacatgaaatctatcattttaatacattttaagcttaaaaaggatttattgctaactataggtgcaatatattacagcagatctctagaacttactcgtcttggttatctaaaactttgtacctgttgagcactaacttcccggttttcccttccccccaccacccttggaatcaccattgcagtgtctgattttatgaaattgaccgtttgagatacctcatgtaagagaattcatccagtatttatttttctgtgtctagcttatttcacttagcataacggcttaaggtccatccatgttgtctcatatttcagagttgtcttcttttttaagcctgaatagtcatttatccaaagaagacatataaacgactaatgacatatacgtggctatatgttcctggctatatgttccactgtgggcccaaactactatattccagatggacttttccatttttttttttaatttattgaatagatagatttagagggactcctgtatgtcattttctcttgctatccccaactctcagtcctgtccctctttaaatcaatgcagtgaagattccatacattttttgatatataaatgaacctttgtccagtttccagtagaaatacaaatctcccactacttttacggttgtttatgtatttcactgggaattttaaatggaggaataattaaataaataaatttctatccgcatcttttgtaaaaagttaccaataattatgcttggggatattggattcagtatacatatattaagtagcatgcacttgtggaaagtgagaaatgggacttggaagaaaagatgtatttgcatctgctctatgacaccttttcagtactttcatctctaagttcccatggcccttattagctgtttttacacttacagcaaaacagagtatgtgtgtagatttacagatagatagtaatcaccttgagaaataaaactgtgtccttttttaattgtcctgattcatttgtgtactttgtattgataacatttagatggtgtagcattatggggacaacaccaaattgaggagagccttaatatatctagaagatatatatatatatatatttttttttggtaatcaacaagttattgagggttctttttttttcttcaacttttattttaagtcccagggtgcatgtgcaggatatgcaggtttgttacataggtaaacatgtaccatgatggtttgctgcacagatcaacccattacctaggtattaagcccagtgtcctttagctgttcttcctgaggctctccctccctctgcccccactcccctgacaggtcccagtgtgtgttgttcccccatgtgtccatgtgttctcattgttcagctcccacttacaagtgaaaacgtggtgtttggttttctgttcctgtgttagtttgctaagaataatggcttccagttccatccatgtccctgcaaaggacatgatctctttcctttttatggctgcatagtatgccataaattcttattgtttggaaacccaaatgttactctctaccaataaacattattccaaaagtatatactttaatcactaattatatttcctcacctaaaaatcatgtctcttcattttataataccccaatacataaataaccttgtacactttcctaattatattaaacattgatattaaaagttaccattgcttaactataaagatgccccataatcacagaactctaaaatatttgcttctctctttataggccttacttttatcaaatgtttctcgacaaaagttttccactggggaaattattaacttgatgtcagcaactcatggacttgacagcaaacctcaatctcctctggtctgccccttttcaaatcctaatggccgtatatctcctttggcaagagctgggtccagcagtgttagcaggggtggcagtccttgtgtttgttataccaataaatgctttagctgcaactaaaataaaaaagttaaaggtaagaaaatgactgcctcatgttacatgtgtcaaacaggagctgagttttctgacttgagttaacaatcaccatctcgctaattatatagagagagttacaaatggaagtcatcgaattttatcatttacttattcactcaaccagtattgaacaagcatgtatcttatgtcagccagtgtttcaggcacaggaagtacagcagtgaggggaaatgacaagtccagctctcatgaggggtagtggaggagacaggcattaagcaagtacataaatagagagaaaacatttgtatatgaaaaagatttagtaaaatacagtgatgaagagacaaaggatgccattttacatttaggatcaggaaagtcctcagaaagggaatggtatatcaacagggtgaaggagtaattcaagtggacatctgagggaaagacacaccaagcaaagggaagagtatgcatgcagcctggaggtaggggtatgcttggttgtttgaaaagtgaagtactgcagcaagcagacaggaaatgcttcactaaattaatgttgatattcttcctttatattcagtcattcatcttaccatcaatatatgttttgacatcccgccatgtgttagacagtgtgcactatgctatactctaagaaatggagaaaccacagagttcactgcattgaaggaaatcacactgcaatgagatagatgctttcatatgttaaattaacagaggtggatgtattgcttatgaaaacattttataattttaaatggatcaaagattaacaatatatattgacatggaaacatgtcaatcatattttaaagcaaaaaggagattaaatatatgcatgtatatcatacatatgtgtagctatatcattgatccattattaaaatgtgaatatacctatacacatgtgtgtaatggagaggtaaatagatgaagatacatagctataaatatatttgcataagcatagaagtaatctagagataaagcatcagtctttaaagaatagttacctgtaaagtagaattagacagaaggaggatagatttttacttctgactttaataccccaagtgactaaaaattgtatagtattttatatttttcttaatttttcaaataaaagatgactggtttttaaacataaaaactagaaaatagcatatatttatgaagtaaaggtacttagcatgctagtgtttagaataacagatttgtttataacaaatatttttaactagttttaaaaaatatattctggattttaaaaactgctatttaaaggcacattattaagaatggaaaaatattttttgaaccttaatctagagtcctataaccttcaaagatatttcaatattatatccaaatatactaaataaaaaatatgactttaggcccggcgcagtggctcatgcctgtaatcccagcactttgggaggccgaggcgggcagatgacctaaggtcgggagttcgagactaaactgaccaacatggagaaaccccgtctctactaaaatataagattagccgggcatggtggcacgtgcctgtaatctcagctactcaggaggatgaggcaggagaatcacttgaacctgtaaggcggaggttgcagtgagccgagttcatgcaattgcactccagcctgggcaacaagaacaaaactccgtctcaaaaaaaaaaaaaaaaagaaaaagaaaaagaaaagaaaatatgcctttaaatcacacacataatactagtggtattaaattgcacacagaatatgacggattagcttgtaatgcattcttcataagatatacaaatacttatgacatataaagtgccaatttagtggagaaaacacttaagaaatgatacccaaacaagtataaaatattatgataattgttaaatatttgaataaaaatacaattgcataacatttataaaaagaagaggaagggtatttgaaaatatacattttaattattctaattcccaaagaacaaataaaatttatagagagccttatttttattcttgtgacacttctaagtatgtacataaacagttaatggagtttttagaaatgtgttctattttagtaggatgtgggtgttattttattattcattttaaacaaattaggtttaaataaatatattttctactattctactgttcgcctgttggctatgctcaagttacctatttataactatcttccaacattgtcagtagaataatgtataaatattgtaagatgcttttctccattaaatcttaagtaaaaatagagaaaatagaccatatttttaaaatagctgtggacatatcagtaaaagtattaccgattttgtcaaatattcttttatctcctttccattaaatagaaaagccaaagaaagaacaaagataaacagataaaactactcaaagaaatcctacatggaattaaggtagtatgaaagggatatgccttggatctattttgagtatagtaatacaaatgaagtttgtagtgttctcaatatctcagagtgatgatagataataattgttggcagaaaatttcagatttcagatattgtaggaattcttatcactaaaataacatttaaatgcaaagccaaataaaatgcagccatttctttttgtttctcacacaagtaaacacaaatatcctaaaagtcacaacatattacttattttaaggtattatgttgaaaagatgcgatgaagcaggcaagagtggtaataatacatccatcagtgtaaaggcagatttatatagtggaagtgatgaggtgtcatttaggttattttatgtgggatacaaatgatcacataaatgctattctataaatagtatgttgcaaattatttttctctagaaaagctgggatagtttaaaagtgagagcagtcagtatccttggggtctgataacaggtgttataaagcctctctctgacaatactgataattgctaccatttattaaatattttctatgcatcaaatgctgtgcttattactttatatgtgtttcctcatggaattcttataaacctcaagaagaagatttcgcatttccattttattaactaggaaacaaagacactgagcagttaagggtcaggtctgaatttacagaaccagtgagagtgtattagagttctccacagaaagagaatcaatagatttcatatagagagatatagatatagagaaatatgaagagagatttaagaaactggctcatctgattgtgggggcaggcaagtgtaatatctgtagaacaggtgggtaaacagaaaactctagcagaagttgatgctgcaatcttgaatctgaaggcaatctggaagcagaattccttccccactgaggaacctcagccttttctcttaaggctgtcaactgatttgataaggcccactcatataacagagggcaatctgtctaactcagagtttaactgattgaaaagctaacagcatctaagaaataccttcacagaaacatctagactcctgtttgaacaaataactgggccccatagccagtcaagcagtcacataaaattaagcattgtggccaggcgcagtggctcatgcctgtaatcccagcacttggggagaccaaggcatgtagatcacctgagatcaggagttcgagaccagcctgggcaacatggagaaaccccgtctctactaaaaatacaaaaatagctgggcctggtggctcatgcctgtaatcccagctacttgggaggctgaggtaggagaatcgcttgaaccagggaggtggaggttgcagtgagctgagatcacgccattgcactccagcctgggcaacaagagcaaaactccacctcaaaaaaaaaaaaaataaaataaaataaaataaaataaaataaaataaaataagcatcgcatagcgctggaatttgaatgtaagtcaattcactctaaagtgtttgcaataagccagtgtaagatcctatttccccaaattttctgtctcagaaaatagtttacaatcttaaaacactaatcagcttcagagaatggcttgaagtaccaaaacatctgtcgtaaagaaactagaaaggcagggagaagagtttagctataaagaaaaaggtaataggtagaagtgagagttggtcagcaggaagagtgacagaactgagctagacggaaactgtctatggagttctatggagttcgtgccttacagctgggatgttgccagagtctggctcagaaataagctattggaggtggtggagacataagactggggaatggtcattccctccttctgctccgctcccacccccaaaataccgcaatttaagaaaatattctgattcagtcaaagtggaagcaatttagttttctttatggttgtaccatcattttttatcttcacgattgtgtgtgtgtgtgtgtgtgtgtgttgtttgtttgtatgtgtgagtttttttcttctatgatatagattggcagatcattatcgtgtgactcatttacagatcctcaaactttatgcatgggaaccctcctataaaaataagattatcaaaattcgagatcaggaattggaatttcaaaaatcagctaggtatcttactgtattttccatgttgacattaacctgcattccattcttggtgagtgtatgtcatatttcctgttttgattttcaaatctgatttacagatttacctccaaattacttggaattaagatgtataaagttaaatattatgtatctgaattaaaattgtaaagaaatacattcattaacttatgtggattagagaacaaaagttacaaagaaagggaaaatactgtatgtgttttcattggtctgtattttttaaacacaataagatttacttctctgtaaatttctcagagatttttcatatatgcctatatctcttaaaaatataatctacatttcagagtttcattccagttttaaagcttgatatgtatgactgattccttttaagcagactcaaagggcctattatatggagatgagaagagaagcaacatttattgagttgttactgaatgtcagggaagttacatacattgccttatttcaatctcacaataataaggcattatttttctcatttcacaagatgaaatggaagtccagagtagttggaaacatcctcaaagttataaaattggtatttagaggcaaattgacatgaagtgacattattctctttctattacaccataaacattgggaatcccatgctattttaactagaatataaattgccttgggatatgaagccatgggcaaaagccaaaggaaaagcaagccacatataaccggagcatcagttttaatcaaagttgccactctatgttgataattaatttttttgtatttcaacaaacgtgagtattatggaagtgaatgcaatatttacatttggaatacattggtaagaccatccaagatgtatttgcttaagccagtactatatacatgatagtaagtccattctcatgcatgaatgaatttttcctgccttttctagatgaaacttataagaacgaatataaatcttagccatgatttattcatatcttcctcagttaatcttatgacacaaagaaagaataattattatatataagtcagaatgtatgcaactggaatataagtttacataaaacttctgaatttaaagaaatgatgaactggtttacaatgtaaatgggaataataactgtggtaagaatataacatgtcttacaagaaaagcgctggaccacatggtctcaaggatgtcattgtccgagatacatgagtttatgacccttactaaaatatattttatgttcttcagcaagagtactaaatttcaggaaacaaacacaattatttagattttattttctaattttggggactgtaactaataatgttatcagtagaaatttgaagaaaataacacatctctattttttaggtgtccctggcaaccttgtgtgtctatttcttactggatgaaggaaacattttaacagccactaaagtgttcacatcgatgtctttgtttaatattttaaggattcctctgtttgagttaccaaccgtgatctcagctgtggtccaggtacatacagaataccttaaactaggaattattcctttactggagtctatggtttgtgacattttatttctttgtctttttaattttattttatttcactttatgtagttgtttaacactgcattcaaaattagttttcctgaattaaggaataatagagaacattatagaataaaaagaatcatgtcttccttgcttgtgctttttttccatcaaagtgacttttaaatatttcaatatgttattttgttttcttgttaagtgttagattctctacttagcatttttaaagctggtgttagccactgtgccattacaggattcatttcctgtttccaacggaaaagttataattaggtgctttgtatgaaactagatcgaatgttttcccagggttcagcagcatttcatctatactgaatgaataagcagggagacaagcacattgataatatcagtcagccaacaagccaagtgtgagatgtctgggtcagcctgcttttagttgtaatctccagttcctggaggctgtttagatgctagatacaatgagtagatggttgctaaagccacaggaaacccagaaaagttccttgatccttttgccctgagatttatggttacattttttggatgtcaggtttggccatcctccattcaattattttcctcaagtctggattcataaacaaagtgaatatttgcttattggaatcatcctttaatctaagaactttactctttaaaaaaatattatttgaataaggagtaacataattgaatagtaaaaaccaattaagctatttttgttacatctttttcatgttatttttcttaaaataaccaacagagggcatagaagaaccgctgatgtgatgcttttagcatttgatttcatagcacgcttctcataaagaaaatgtcagttcttagagtaacagtttggttctagttttgaaattagaatctagctaaaggtccgatatcaaagccttttccaattgctagcagtactctgctaccttcatttaaggagaccatttttccaaaatggaaaaaaaagaaaaagctaactgtatgttctgatttgacacacttggtaaacaaaactacagcccaattacatcttatgtgttaacgatacaagtcccctagcacaaagtaaataaaaatgtactagaaattgtatgtaagtcagttttcagaaaacaatgtaattttatttatcctaatgtagccaaacattttatagctattttactatattactatttcctatttcactataattgaatgttattattatcaacattatagttttgtttatcatcagtagcagaattcactcaccgatcttaaagttgcttttaaagccttatttttctgtattacaagaaaatatcaccctacacctgttaggatggctattatcaaaaagtcaaagaataacaaatgttggcaaggatgtcaagagaagggaacccttgtgtactgttggtgggaacataaattggtacatccgttatggaaaacagtatggaagttcctcaaaaaattcaaaatagaactaccatacgagatagaaatcccacttatgggaaaatatccaagggaaataaaattactatgttgaaaagatatatgcactcccatgttcattacagcattatcaggagccaagatatagaaacaacctaagtggctattggcagaaaaattgataaagaaaatatacaaacaatataatattattcaacatggcagaatattatactaagtgaaataaactaggcacaaagagacaaatactctgttatctcacttatatgtgaaatctaaaaaagtctaacttacggaagcagagtgaagaaaagtgcttattaaggctcaagggtgacattggggtggggtgaggtgaatgagatgttgatcaaagattacaaacttccagttataagatgaatatgttctggagacctaatgtacagcgtggtgactatggctaatgatagtgtattgtatacttgaaaattgctaagagagtagatgttaggtattcatatacacaggaaaataaaggtgcctacgggaggtgatacataatctaattagcttgattgtggtaatcatttcaaaatgtgcatgtatataaaaaaagttgtataccttaaatatgtataatttttctcaattatacctcaaagaagttgggaaaaaatcaatctttctataataattaagagttattatggcttttctagaataataaataagattttcatttctttttcttataactttctgcatagatgacattagctttgatctttgattcttgaaactgccctttgtctttagaaatgaatgtatttataacattaaatcaattcaaactatgcttgctatatttatctcaatatctttaatttgcgtaaaaattctacttagcctgtaaaacgtagtaaacattttttagtttaaattctacttgaaccccagataaattccatctgtgcttattttgatagacaaagatatccctgggccgtttggaagactttctcaacactgaggagcttcttcctcaaagtattgaaacgaactatacaggaggtcagcacttcctcttttcattcattacttatttgacttctgggttgaaggtaattggttctaaaatgcatcattgtatattttttttcttccttagatcatgctattgggtttacagatgcttctttctcctgggataaaacaggaatgccagttctaaaagagtaagtcgtggtttggtgaattttttttaatgttaatattgggttctaaaatgctccatatttttatttcttagaggtttttaataagattaatatactgaaattaacctctcattttacctttcattttcgtggtgattttgctgtccttttttctattgtttcttctgtctgcagcactttattgttcattcgtttgcattttggaagggtaggtgtttgtagaaaaaggtgaaaagcaacaatttcagcgatgacaccaagtgctgcatacagtgacttatctaggaatatattttaaaaacaaccacaaaaagaatttcctatgttgtctccctttcttctcatgcagcttgaacgtaaagattccagaaggagctttagtggctgttgtagggcaagttgggtctggaaaatcatccatgctttctgccattctaggggaaatggagaaacttaccggagtagttcaaagaaagctaaaataaaaaatacattctttcaacatcttctaatgtaacaagctatagccaacttgtcattagtgtcaataagaatttatcaagttgaattgaagatgcaagcatttaatgggcatttctagtttataagaaacatttcaatttccatagaaattgatgaatgatgggtagattaatgacagaattctgttctccaaatacttcagcaaatcatttataaatgcttatggtaattgtttgatgatattaactgaattgcaaccaattatagagaaaagaatgtgatttatattgtaatttgattaggtttctatgtattattcagcaaggttccctaagtaattacagccatttcatttctaagaagtcttgcagccagtctcgggtaggatctttgaccaaaaagaaacttcagaaaaataaagttattaataacttacatttaagattcagcattaggaccacgaagaggtctacacttgactaattgttctattcttaaaggtcaataagaataagaattgaacaagttcttaatcagctttctctttttgaaacagtagactacccggtgagtttttccttacgtgtaatcaactcttaggtaaaatactaagtagcccatcttttcttcttacctgtgacaagatgaataagctctgtgtatcctgagatcagtatctcttcactctgttattttttctttcctctctgggaaaaatcaactctaactccttttatttttcctcatatatttctttatactcttacatctttcctgattccagtcctttagtgactaaatttttgttattctcttttatctcggcatgaccgttacctagtctagggccaaatatgattcctatgactttttctaataaaattgcacttaatgaacaccactatttttaagccttaaatatactatctttgtagcactatgctgtttgtagcaattgcaattagccatttctctgcagttcaagatagctgtaccttttacttgggtgtacattacaaacataatgagtgtcatattaattttatttttatttagttttttcagctattttcactaagcagttactgagcccatgctatgtacctagcactttctgccagagaagtaaacgtgaataagatatgcccctcttctttcaaaagtcatagtctagtgagggaaatgcaataatcaattataaaaaggtctaaatcagatataaaaaatgaattaaagcaaaaaaacaacaaattctgcttcgaagagttcgaaaaagaatctgagaggaggtcgctctttatctgatcttgaaaaataattagaaattgataaagataaaaataatgtcaattctagatttcacctaattcattaataatagtaataagctgaaaaggctggggttagaattgcataggataatgtgcaaagacctagcctagctcctctctatgaatatgtatgatgatcatcatctttattacgattgttgaggctctcataataagatttaaagattatttctgatatctttgaatgtttttaattaagaaggtgttcctagtgatgaaagaaactgtaataatgccattattagtgataaaacagagaggatattctttgtttatattaaattacagatgcccaagtaaaaagatattatctgtttttataactggtcattggccttcaggaagattttgacctggataaatggcaggatttgaagtatcacactctgaattatttccccaaatattttttattcagaatttgtatcatcttgattatctctatttaagtaaaattaacattatagcagcattttcaaagtgcttttgtgtgcactttctatttttcggtttttcagatgattacttttttgaggcatattttaatccacaatgttcaaactctaagactgcctattatcgctaaactttctctgtagattccctactcttctcagtatcaaaagctcacaccaggcaccgttcatgaaaagtattcagtattcagtgttctgtggtagaaacatcagagatatggagaccatttttgaattcacaaaacttctattataggttcattattaagaatgaaacaaaatgttttcatttgtatgtgaaaggaaataataaaaaagaacatttacatctctgtgaaaattgatcaactctttttcaactgttttaataccaatgaaaggccatacctcttaatgtagtacttagtttctgttttctcatgttcttcaatctcttctcctttgttttttatcctctgcactgctcaacttgcttaatacatagcaaatattgaaaatatctatcagtcacgtgctgacttaatatgcaattcaaagcaaagtttagattattcacttcacaaggcaatttgataacaattccttttgtgttcaagatcaggtcagatcagaattatattgtttttgatcaaaagccattctgtgtcttacatactcaacaaagaagaattataagttaatctttcacctttaaagtagtaggtagaaatcaaaaggctaataatggctgcacatgtgtgtatatcagaaagtactttaagtgtctggtattgttacagagtgtggagtacttaaaatactaaatcaatgtttggattgagtccatggggcagattgaaaggtaggccactagtgcaaatactgtgggttctttttctagaaaagaagggttagttgagaagatattttatgcagcagactgtcatatatttaaaaatcatttcaaggtataaaatcataaaaaataaatttgggatcagtggttaatgtgtaacacacggagatttgccacccagatcctcctattagttaagacttctacaagtcccagctgtgggagtatgaacaggaagtcatctccttcaaggttggcctggacttcagatagtgacctgtcccagggtcccacttttgctcagcctgacttgggacagctctgatgaccagttctcttccatggcactctggaggattggccaaagctttcttggttctgtatcacatctgcatctgtggcttctccctctgcctaatcttccctcttcctttccttccacaggggttgatcccaaataaacaacttgagccccaaaatctgattcagtgttatagactgaattgtgttcccccaaaattcatatgttgaagttctaattcccagtacctcagaatgtgactgtatttggacacaaggtctctaaagagctagttaagttaaaataacctcattaaggtgggttctaattcaatatcactggtgtccttataagaggaattagcatacacacacacacacacacaaagagggagagagagagagaccatgtgaaacacaagaaaattacaatcatcaacaagctgaagagagtagcctcagtagaaatcaaccttgctaacacctgatttcggacttctagcctccagaattgtgagaataaatttccattgtttaagccacccagtccatggtatgttgttattgcagctctagcaaactaccacactctgcatctgcttccagagaataccactagagacagataacttagatagaagctacagtgaaagtaaataagaagcacaaagtaactcatttggaggaaattccaataaaacataaaatatggtgccatgatctatataattatatttatctatattaaattttttatttctattttaaagctaaagaaggcaaaaccatgagttaaatatgttcctttactatggagcatgcaacttctccttttctctagttaagaatttttttttaacctctttcttttttagggctctgtggcttatgtttctcagcaggcctggattcagaattgcattttgcaagaaaacattctctttggctccatcatgaagaaagagttttatgagcaagtattggaagcctgtgctctccttccagatttggagcagttgccaaagggagatcaaactgagattggagaaagagtaaggaaactgtaatttatcatgtaaagaaatataatcccattcagctgtgctaataaaatgtttatggcctttttcttgaagtctcgaagagctatacaactataattttaaaaaattattatgtgattcctatgtaagagatggcagtattaaggacaagtaattatttataattgactgtttggaaaacagattaaaaatcagtcggaaattctgttgttagtatccacgtgggggaataaaagcccattaattagatcatcatacttttgttttggtggctggcacaatgcagttcactttctaaagagtgactaatagttttgtttattcctgtatctctggtacgcaaagtcagggctaaaacaggagcgaaagagcatcagtctccagcagtggcacccgagtccagattctaaagaagctctgataacaacactgttatgaacgtgccttctccacgtttgctcattcctgcttaagtggaacttgtttcccagtcgtctctctttgttctatttcattttcattgtgttagttaatagtcattactctgctcagtgttttggatttaaaaaatatatatatcacgagccgaagtatgaaccacgagagattatctccaccccctgactaaaatctccattaattaaacatgaatgcaaaagtagcctctgcctacaattcatgtgtgccataaagatgaataaataatccttactgagtgctttgaatctctgaaaagagagcgagcatacaattgttagacatctttacacctgccctcatgttatctaataagcccattatggagtttaatacaagaaatatataacaaaattgtagaacgtagaaatatataaaatccgggatgagccagaatttaccttgtaactagaattacttcatttataatctataatgctacagatgtatattctcaatagtatcaaataggtttattttttccaacccttggatttcttcttgcatcttcaccatctctaagcaaagtgattccatagctaaaaggcagaaatgtgaattcttcttcaaacttgttaatacatgttgaacaagatgctgataaacccaatctctaaaaatatgaaatatctgatattttgtaactataaaaaatcttaaaaagggaaacaaatccaaactaagaagtatagatttaatataggcattgaatgctattgccattcataacgtcttatttttatgattaaatttatcccgatctgcatttgaactttacacatgtaattgaatatttcaaaatgaaatctgtttacaggtacttaagagacaataaaggcaatgactgtagacttttcccctacttgtattcatcttttcttttggtattcttcatttgaccacatttattaattttttatatgcccttattctgctatggggtacacaatggtgagtgagagctctaccactcttccttcaagggatttgcagtctggtggacctctgccaataatactaatcagttgtctttatcaatatttatgaatcatctagcgttagatgctgggtgtcgggaacacaaggattaactaggtaggagctcataggctagtgagagagactgagataaatattgccaattctagcaatggaatgaatacacaaagtgcagcaagacaggaaggaggggaatgaatcacttcacttgggacacctgatggaaagttgccttcagaagacatttcagtgtgagtagcccttaagttaaaacagaaggatgtggtctcccaagcagagtgaatagcctcttcccagtatgaaagaccaggttagtctgcttggcaaaccacagtcacttgtaggcaacattgggagagtgggtgaagagatgagttaatgccagaatataagcatcttagatttatactaaataatttgttgtttttgctgttgctcatgagtgatgaaaagagggagctgcggatatccaaggttttcatgcaagatgatgacataattacagaaaagtgatgacaaggtagagggtgaattagaaagaaaagtaactggataatagctaatgttgattgtatccatactgagtgttggatttttcctaaaatttttactctaatcttattgaatgctcccaacaaacatatgacttaggtgctattataagcatatgcacacacacatattacattccttcatgtgtgtgtatataagtgtgtgagaggagggtgtataatgcctatgccccttgctaaaatgtgacctcctcatgacagactctgtttcacttatctttaaatcccaagcactagcatagtactcaaaatatagtcatacccagaagatgtttgctgagtaggagaaggatgaaaaatgcaaagaggcaatggcattttataattacaggtcattggctaagttctgtgctgcactgagagattttaaaccagatctgtaaacactaaatataaaataaatcaagtaaattgggcctggctccataattcttcatacatggttgtacgtgtcaactttaattctcacatggagtgatgaatattccctattcttgcttcttagagttgtacttttgccaacaagacttgtactaatctttctacaggagaaaataggacatgttgattacttctttggtaatttagctattattttcaatttcctatgtgtcaatttaaaaataatcactagggccagtatatggttggcagccaaaagtcttgtttaatattctacaggcacgacttttcagagttagagattcggaaattcttttctccttaatcgttagcttctccttaatcgttagcatctccttaatcgttacgagtaagcacttcagagaaagtagatatatcttctaatttgtgcaagttagtaatgctaggaaacgagatggggctaggactggaaagtcgtagataaagaaaggttggagcgttcatcttgggttgctgtctatccatgccatagaagagcatttggatgtaactgcacgtgctttgagatctatacacatttcctctggtcttgtttttcttctgctccattttcaggctgtgaatataagtgggggccagcagcatcgagtaagcctggccagagctgtctacagtggggccgacgtctacctcctggatgatcccttgtctgctattgatgttcatgttggaaagcagctttttgaaaaagtgatagggtccttgggccttttgaaaaaccgggtagccatagtttcatttatgctttcttgtggggcaggggatatatctagcactgtgcctaaaattccatttattttgtttatttgttgaagcaaagtagtcacatttcacatgaaaaaaatgggatgctcagattgcaatttcacaggcaaatgtcaatgggtaatttttgaagttttacttacaagtttactctggtgacaatttatgtgattgttatctcttcatctaataccatatcctaaggggatgtatgtgccataatgaattgttgttgactcaagtgatttttacaatggtattttggtgcacaccaaaatattaataaaattttatattattaacatagcaatttgacattattatcacagcaatcatagtgattcagctgttttgttaaagggccaagaagatgaaaattagtgtttaccagtacatgccatatttcacagggtaaattagttcaatccctatttcacacataaaggagctcagggctcacaatgacttgatataggttgctcaacttaagaacaatagagatttttaaaagtatgtctgactccaaagccacattcttcataatatgtgtttatggaattattaatatagagaactttgaaaatatatgtataaaattataaaatatatgtctcagtaaaaataaacaaacatctttatatattgacataaacccaagattaaaaatgtcacacttaattgtatgtatatgtataaaataatatgaatgatttaaaaataaggactatgaattatgacttggattaaacacttttttgtaatggtactgtatatttaaaaataagcaagaatgacatatatgaaattgttttaaatttgcaattaaattgattcatttctaatgaacgaaaaaatacccgaactaaagtgttaaaaatcacatttagaaactattttctcatctagcagcatgtcattattccttgtaaaatacatagatgctgccttaaactggcacctaccaaaaatcatactctgaaatagtaaaggaaaaaagtcattgtagctttttttaaaaagccatttttcgtaatctctgagataaaacactttgtttttcagactcatattttagtgacacacaatctcacacttctgccacaaatgaatcttattgttgtaatgaaaagtggcagaatagctcaaatgggaatataccaggagctgctgtgtaaaaccaaaaatctcactaatttgcaccaagtcatcagtgaacaagaaaaaggtaaggacacaataaaaaataagatacagtatacgtacccattttgaaagttcattaattgcgtaatttcatgctataaattttcattcatcctgcttaagtcaggggcggggcaccttcctttccttgggaaagaagcaaatacaatgagacacatcagttaaatcaaactcatttgtgatttttaaggaaagttttaagttccctggggcctgtttattcatttatgaaataagaaattagattacttataaactctagtccaagtcgagaacataatcactctaaacattatatctacttttcagttaagaacagggaacatacatgtgaaataaataataaatattttaaacatctagatataatatagcacattgaggaagagaaaacaaaagaaagaaattgggaaaggcaaaagggatcgatgtttgctcaacttttaagaattaactatttatttagttttatttatcaatttttgttactctagccctagaatattaaattaagatgtatggacattttaaaataaaataagtggtttgatccttatccaatgtgtaagatgcaagaatgtctgatatccagcattatcctaaagttgggtaatgtaccatcatctctttttacagctgtagatggtttgtcatgtagagaccatcatattttttcctgtacttttctagatccttttcctatacctttccagagcagcgcagcaaactaactgtaaaaccagttaactatttcataatttcaagataaaagaagaaatatagaactatgtctcattattttctacatgaactagtatccattagctcacctgacacttgtcctggatataaagtcctaaaaatatgaagttggtttataacaagatcagtacaatttattattttaatgccatgaaattcaacaacaaagtcattttgttgatgtttctcttttggacctaagctaacgcacattagttttgtagtactatttttaaaattccttgtttttccacctttctcatattacaaatattctatttgcaaaattatttggtgcattgtcagatgactgttggcatccttaacaaaagaacttcctcttttcttaacgtctagcactttggaaatgattccttgccttctcagaaaggttaagtagtaatttatgcttcttgtgtagaaaacagatgtctaggagtgcctcctagactaggagaagcatggagtctgtcatttctctatccctgtcacttaggtagcctcatgctaggcaaattacaggcactcagtagctgtttgttaaacagatgaatctgaaatgtatctatcccctcaggagttaacaaggtgctatggaatgctatgagccagtgtctttcttgtgtgtgtggccatttattttaaaggtcacatgaaatatagattgaatgactttagaaaatatagttccaaaagtaggcagagtgtaagctttaagttaaatatgtaatttgccataaaatataaacagtatgtcttttgaaacctgtggaatttgctgttgtttaaatatccaattttggaaacagaaatcccaccttttctgcatttgtataatttttttaggtacaagtgccctctactgtagcagaataaaagcagtaatattcttaaagttggactgatagatgttaatagatctctattaatagatgttaccaactcacaatcagaaatttgccagagttagaaaaatgtaactttaacttctttctaattacctcaatatttctgtcttttccatgacaatcagaaaggtggaaagtagagaaaatttttatgccagaaatagaatgtgttattaaaagtgaatattctggaattttgattttttgaatgctggataaaaaatacataaagacttatactcacaataaaaactagataactagatcaagagataatctgtaaaagattagctctatagagtatgatttccttagccactgtagggagcaagacaaaaatggattttgatatcaaacactacattaaataatagcttacattcagcatgatgtcctgcaatgctgccccctaaacctgggccaaatgaacctggccctgtacttcatgctttagtcagttcccactctagccttccctgcatggctctctgcctaggagtgtcctccccatttcctgcttcttgaccatctaggtactcaggtcccagaattctctgctcaaatgatggaagcttgttcctgggacctgggttctcattcctcaggtttgttctctcatggacagactgccctgtggcatgcatcattctttggcctgaggatgtttctcttgcaggtgggagagtgggaagagtctggacgtggcagctgaggtatctgcagatgtacagagcttctgagagtgcaaagtggagcttgggagggggagaagagcagcaaaagccttggctgagactgactcatcaaggactgccatgtcccccagaggaagtctcaggaatccagacattctcatcagatccttgccttccaggtggcttggaaggtgtattggtcagagaaagcaatataatttgagtcttttagttccatcaatgacttttaaataattggaaatgcaacatgtgagcctttatttgcattcttgctctggttccacagattttaggtgcaagtctgtccctgtggggaatttctttctgttatttgcataaatatcaagggaaattagattctgtttgagcacacttttgctgagatttaggggaaagaaattacctggcagagagtaggatgtaagaggtgtaatcactctgtgatctttcatttatttattataattcactctttttggtcttgagtctgttcaaaaattcttttaaaaggtacacaattcttcagtttcaaaattctagttgtttatgtgtcactacaatgggagtgcagtaggcacacctcatccacaaaggatgcgttccaagacccccagtggttgaatgaaactttggatagtacctaactctctatatactatgctttttgaaatgatgtatatgcctatgataaagttcaagctataaactgggcacagtaagagattaacaacaataactaataataaaatagacccagatgccagcatttctactcatgtgctttggggccattatgaagaaaaataagagttccttgaacacaagcactttaatacaatgacagttgattggataacccaggctcttaagtgagcaatgtgtggggagcatccacacagcatggatgtgcttgctacacaaagagatggctcacttcccagacaggacagagcagaacagtgaaatatttcaacaggccactcagaatagcaagtaatttaaaacttatgaattgtttatttctggagtttttcatttaatatttttggaccacggttgaccgtgggtagctgaaaccgcaggaagcaaaattgcaggtaagggggaactagtgtataaatcagcagaacattgtggaataaacagtggaccacttgttaggaatcctggaatctagttctctcactgaataaccatatcggtcttcatcaaatgactcattcttgtggttcttcccgtttgtgaaatatagtgcttcagcttgctctgtttttcctagtggcagacatggagctgaacaatgtacattattatctctctcctgtcccccaaactacttattagctatttctttttctttcctatcattcttactctcattgctgaagtcaataacaggtagcttagaaagtaaatggtaaaaagtacactttgcagtgtaatgtgggtttggatatatctaatccctaagattccacctagctctaaaaaatctaagagttttgccttacggaaatgttatataagataatcaaatcagaggtgagaaatgggtttatgaagaaaaatataacaaagctaaagataaattttacatatttacagatttaggttaggctaatttttttttttttgagacggagtcttgctctgtcgcccaggctggagtgcagtggcgcgatctcggctcactgcaagctccgcctccagggttcacgccattctcctgcctcagcctcccgagtagctgggactacaggcacccgccactgcacccagctaattctttgtattttttagtagagacggggtttcaccgtgttagccaggatggtctcgatctcctgacctcgtgatccgcccgcctcggcctcccaaagtgctgggattacaggcgtgagccaccacgcccagcctaggctaattcttacacaagctaattatactgatgatagcttgtatgtcgtggatagtaacgatctcaatatattcatgagttttacatttacttaatcctcccccaacccccaaaactccagaggctaccatggtcctcattttacagagattaggtgtcttgctcaaattaagacagaaggcaagtgacagaatttgaattccatgctacctctgtttcatgtcagagaacaaccaagctcttaaacattgtatcaaatgtgtaggaacaagtacattgactcagtactgacttagtgtgaaaagcaggagaggctcactctcctttactgatgcttgcttcttccccaaaagttggtctcctcccttgctctgtcttaaacaattctgggtttcaggcaagccacttaccctctctgagttttattttttctcctgcaaaatataggtaaatttacctattctcatatcttatcaggtcatttgtgagctcaatttatataatgcatgtaaaagtatcttataaattgaaaataaataaatttaaatattattattaaaggctataaagatgagactgtgccttagagggagaggctgaaacatcttctaactgaattttcattctttgagccacggaatccccatgtttcacagagatgtttgagatcgatcaatttcttccattaggggctagatggttccttctagaaaaaagcaagcatagaattcatagaagagaacttagaaatctccaaatccaattccttctgcttagagataagaaatctaaaattcaaagagttcaagtatcatactgtgaataaagacaaaaatctgtctagcgctgaggtatttaccatcaaatccaccagcccatttaccatcagattcactaaggttacttgaacctcagtagctgataggtctaggtgtatgaccttggtttgtgtttcctgtgtaagagctcagtgcctcagtctttttatccctaaaataaggacaataactgtagtacgtttctcattaggggtagttttgaaaattaaaagagatacaaagcccttagggcaacacgtgtcacgtaggatgctattatcactgttagtgacacttgcaagacagtgacagctttggggaatttaccattgtgttttcttactaatcttcacaagaatcacattggtataaaggctgcatgaaattatgcttcttttaaaggctagagtggttttcctcttgggaaatatttagcccttctgtggaagatctgaaataagttagcagccctctcagagggacactgagagagttagcatccctttctcagagaaaaaaaaaataatttctctgtaggttttctcattaagaaatctcacttttactatgagattacagaacattttaggacaagctgaaataatggagaaaatacaagggttcccaataaacctatagatctagaacttaaaaacctctccaatttgtgtaatcctccattatacttctctctattttgtttattgttggcttataattttggatataaaagcactcactgtctttctctccagctcatgctctaaagcaagtcagtgcaatcaactccagaactagaccaaaagacaaaatcctggagcaaaaacataggtgagtatcaggtaatgccaggctcactgggattatggactgattaattacttttttatagcatttgaacacatcctataaaaaagatccatacattataatggatataaaatgtacttagtggattccaattctaaactagaagttagatggatgtgtctaaatttttaagtgagatggatgagacttagttttggaaacatatgttcattagattcctcactatttctagccaaattctagtggtagaaatttaatctgattgccaaaaacatccccatcccatagcattcacagactctacagatgagaatgtgaaaaataggctttggacataaacatttcatgatggattgggatgattatcaagacaggatatgtgacctagacatacagaccagtataggagctgaagaacctgcctagaaaaataagagaaagaaagagagaaagagagagagagaagaaagcaagaagaagaaagaaaaaggaaagaaaaagaaagaaagaaagaaagaaagaaagaaagaaagaaagaaagaaagaaagaaagaaaagaaaagaaaagaaaagagtagaaaggagggcaggaaggaagaggggaggagacaggaaaaaaaagggcaaaactttggtcctgattggattttgttatattatgtctttttttttgtaactgactaaaatgaacagtgattgaagtaaattaatctaatcagtttttttccccaatgtttcttcccatcagttgcctaaacaggaagccaaaagataataggaaataataggaataaagagattataggctgggcgtggtgactcatgactgtaattccagcactttgggaagctgaggcaggtggatcacctgaggtcaggaattcgagaccaacctgaccaacatggtgaaatcccatctgtactaaaatacaaaaattagccaggcatgtaggcacccacctgtaatcccagctatttgggaggctgaggcaggaaaatcgcttgaacctgggaggtggaggttgcagtgagccgagatcatgccactgcaatccatcctgggcgactgagtgagactctgtctcaaagaaaaaaaaaaagagagagggagattataaaataagtgcctagagcttataattgctaaaattgagcattgggacagatgatagggaatcaagcactttaggatccaaaagctcagatagtggcagttttgatcttgaatgaaagaatgagtcttgaaataattattttttaagaattggatatgcctaaggatgtgtggatgatgtggacgttgcaggttggagatttgtgtgcatatcagatttagctgactccgtaggtaaactaataataagtcattcctccttgatcataaagatcttggactgcttctccttgtctattatcttagtatttttatactgtctcatggctttactttccgtacactaatatgtccaagttaatctctctagtctggatctctcctctgaactccagggttgaaccggcagctgaccctctcagcatctcccctctaacatctaaatgacatctccaatttacatgtcgcacacaggattcttgattttccttcagcacacacaaacctgtcccacatgtgattttttccaccttagctaatggcaatgtcattcttccagttgctcaggtaaaaaatatcttgcagtcatctagacccttcttattctacatcaaatctataatcaaatcccattggctcgatcttcaaaatatatccaagaatccagaattcacccactactcatcaccttcacagctgccccctctgtccaatcaggattatttctcacttgccattattgtaactgcctgcttataggccttcctgctgccatcttaccccatacaggctatttgcaacatagtatacagagagtttcttttataaatgtaagtcagagcatatcgctcttctgcccaaaacttccaaaagattcacctctcagagaaaaatctcatgtccttacactgacttgtaaaatcctacaggacctggacctgtttacctttctgatctcagaaccctaggaagttcacccttcataactctttccagcaacactgaccattttctgttcctggaatagccaggcatgcccctacttcaaggcctttgcatttctgattcactgcataaagtagactttgttcagataaacatatggcttgcatatccgccttctgttggtgtttgcttaaatgtcatctcatcaatgaagacttgcttatccaccctatttcatatctcaacacttcctactcctttcccagctttactttgtcataagtcttattaatttccataagattgggaaatttacttgttcgttttttattttgtcttcctcctaactctatattataaggttttataagggcaggattttttgttatttgttccattgccatcagctagaacaccaaatggcacatacataagtatttgttgaaagggtggataaataactagagactgaaagaacactgaaaagtcttctgatccatcatttcttttattttttggccattgagacttaatatatttcatttaaatgagtataattttttaagtctccaagaaaagctaatccagaagcactgaaacatactttgaaatccatttgctatggggtatacatatctctgaatcctaaagagcatatttgcctgtgtatagtatcactatgcactcagtaaatagcttaagaaaagcttaaaatgtaaaaattaataaatattgttgtaaacttaatcattccctttcccctacagtaaatcaattttccttatttataagatcactgttaatataatatctaaattgaacctcttgaaatttctgtaagccaattttgggaaaccattccttctttttctccctaaaaaaagaattccagtccctataaatatttgtttacaaaattgtttttttaaaaaattataagttgcagcagctcaaataaagaatacagcagagcatggtgctgcacgcctatagttccagctactaggaggtcaaactgggaggatccattgagctcaggagtctgaaaccagcctgggcaacatagcaagactcttgtctcaaaacaaatgaaagggaggaagaaaggaaaggaggaagaaagaaacagagagaaagaaagaaagaaagacgagagaagagagaagaggaggggaggggaggggaggggaggggaggggagggtccagggcaagatgaccagatgacccaataggaaaagctctggtctgcagctcccaatgagaccaatgcagaaggcaggtgatttctgcatttctcactgaggtacctggctcatctcactgggactgcttagacagtgagtccagcccacagagggcacgcagaagcagggtggggcattgcctcacctgggaagtgcaaggggttggggaactccctcccctagccaagggaagccaggagggactgtgccatgaggaacggtgcactccagcccagatattatgcttttcccatggttttcacagcccacagaccagaagattccctcaggtgtctataccaccagggccctgggttttaagtacaaacctgggcagctgtttgggcagacacccagttagctgcaggagttgttttttttttttccgtacaccagtggcgcctggaacaccaacgagacagaactgttccctcccctggaaagggggctgaagccagggagccaagtggtcttgctcagcagatccctcttccacggagcccagcaagctaagatccactggcttgaaattctcactgccagcacagcagtcagaagttgacctgggatgcttaagcttggtgggaggaggagcttctgccattactgaggcttgagtaggtggttttcccctcacagtgtaaacaaagctgtggggaagttcaaatgggaggaacccacctcagggctacaaagtcactgtagcctgattgcctctctagattcctcctgtctgagcagggcatctctgaaagaaaggcagcagccccagtcaggggcttatagataaaattcccatctcccttggacagagcacctgggggaaggggcagctgtgggcgcagcttcagcagactaaaactttcctgcttgtcagctctgaagatctcccagaacagttctcgagctctactaagggacagactgcctcctcaagtgggtctctggcctccatgcctcctgactggagacaccttccagcaggagtcaacagacacctcatataggacagttctggctgacatctggcaggtccccctctgggacaaagcttccagagaaaggagcaggcagcagtctttgctgttctgcagcctctgctggtgatacccaggaaaatagggtctggaatggacctccagcaaactccagcagacctgcagaagaggggcctgactgttagaaggaaagctaacaaacagaaagcaataacatcaacatcaacaaaaaggacaaccacaacaaaaccccatccacaggtcatcagcatcaaagatcaaaagtagataaatccatgaagatgaggaaaaaccagcgttgaaaattccaaaaaccagaattcctcttcccctccaaaggatcacaactcctcgccagtaagggaacaaaactggatggagaattagtttgatgaattgactgaagtaggcttcagaaggtgggtaataacaaactgctctgagctaaaggagcatgttctaacccagtgcaaggaagctaagaaccttgataaaaggttacaggaactgctaacttgaataaacagtttagagaaaaacataaatgacctgatggagctgaaaaacacagcacaggaacttcatgaagcatacacaagtatcaatagctgaatccatcaagcggaagaaaggatatcagagattgaagatcaacttaatgaaataaagcatgaagacaagattagagaaaaaagaaggaaaatgaatgaacaaagcctccaagaaatatgagactatgtgaaaagaccaaacctatgtttgtttggtgtacctaaaagtgatggggagaatggaaccaagttggaaaacacacttcaggctgttatccaagagaacttccccaacctagcaggacaggccaacattcaaattcaggaaatacagagaacaccacaaagatactcctcaagaaaagcaataccaagacacataatcttcagattcaccaaggttaaaagaaagaaaaaatgttaagggcagtcagagaaaaagttcaggttacctacaaagggaaggccatcagactgtcagtgggtctctctgcagaaaccctacaagccagaagagagtggggaatcaatattaaacattctaaaagaaaagaattttcaacccagaattttatatccagccaaactaagcttcataagtgaaggagaaataaaatcctttacagacaagcaaatgctcagggattttgtcaccaccaggcctgccttaccagagttcctgaaggaagtgctaaatattcaaaggaaaaactggtaccagccactgcaaaaacataccaaaatgtaaagaccatcaacactatgaagaaattgcatcaactaatgtgtaaaataatcaactagcatcataatgacaggatcaaattcacacataacaatattaaccttaaatataaatgagctaaatggcccaattaaaagacacagactggcaaactgaataaagagtcaagacccattggggtgctgtattcaggagacccatctcatgtgcaaagacacacatgggctcaaaataaagggatggaggaatatttaccaagcaaatggaaagcaaaaaaaaaaaacaaaaaaaaaagggtttgccattcctagtccctgataaaacagactttaaaccaacaaatatcaagatcaaaaagacaaagaaggacattaaataatggtaaagggatcaatgcaacaagaagagctaactatcctaaatatatatgcatctaatacaggagcacccagattcataaagcaagttcttagagacctacaaagagacttagactcccacacagtaatagtgggagactttaacaccccatgtcaatattagacagatcaatgagacagaaaattaacaaggatattcaggacttgaactcagccctggaccaagcggacctaatagacatctacataactctccacctcagatcaatagaatatacattcttctcagcaccacatcacacttattctaaaactgaccacataattggaagtaaaacactcctcagcaaatgcaaaagaacggaagtcataacagtttctcagaccacagtgcaatcaaattagaactcaggattaagaaactcactctaaacagtagaactacatgaaaactgaacaacctgctcctgaatgactactgggtaaatagtgaaattaaggcagaaacaaataagttctctgaaatcaatgagaacaaagacaaaacataccagaatacctgggacacagctaaagcagtgtttacagggaaatttacagtgctaaatgccaacaggagaaagcgggaaagatctaaaatcgacaccctgacattgcaattaaaagaactggagaagaaagaacaaacaaattcaaaaggtagcagaagacaagaaataactaagatcagagcagaactaaaggagatagagacacgaaacacccttcaaaaaaatcagtgaatccaggagctggttttttgaaaagattaacaaaattgatagaccactagacagacgaataaagaagaaaagagagaagaatcaaatagatgcaataaaaagtgttaaaggtaatgtcacgactgatcccacagaaatacaaattaccatcatagaatactataaacacctctatgcaaataaactagaaaatctagaagaaatggataaattcctggacacatacaccctcccaagacaaaaccaggaagacgtaaaatccctgaatagaccaataacaagttctgaaattgaggcagtgattaatagcctaccaaccaaaaaaagcccaggaccagacggattcacagccgagttctaccagaagtacaaagaggagttggcaccattccttgtgaaactattccaaacaatggaaaaagagggaatcctccctaactcattttatgaggccagcatcatccagataccaaagtctggcagagacacaacaaaaaaagaaaatttcaggccaatatccctgatgaacataacgtgaaaaccctcaataaaatactggcaaaacaaatacagcagcacgtcaaaaagcttatccaccatgatcaagtcagctccatccctgagatgcaaggctggttcaacacacaaaaattaataaacataatccatcacataaagagaaccaatgacaaaaaccacatgattatctcaatagatgcagaaaaggcctttgatacaattcaacagccattcatgctaaaaacactcaataaactaggtattgatggaacatatctcaaaataataagagctattttttacaaactcacagccaatatactgaatgggcaaaagctggaagcatttcctttgaaaactggcacaagacaaggatgccctctctcaccactcctattcaaaatagtattggaagttctggccaggtcagtcaagagaaagaaataaagggtatcaaataggaagagaagaagtcagattgtctctgtttgcagaatatgtgattctatatttagaaaaccccatcatctcagcccaaaaactccttaagctgataagcaacttcaacaaagtctcgggatacaaaatcaatgtgcacaaatcacaaacattcctatacaccaataatagacaaaaagagagccaaatcatgagcaaactcccattcacaattgctacagagtgaataaaatacctaggaatacaacttacaaggcatgtgaaggacctcttcaaggacaactataaaccattgctcaagaaaataagagaagatacaaacaaacggaaaaatattccatgctcacggataggaagaatcaatattgtgaaaatggccatactgcccaaggaatttatagattcagtgctatccccatcaagctaccattgactttcttcatagaattaggaaaaactactttaaatttcacatggaaccaaaaaagagcccatatagccaagacaatcctaagcaaaaagaacaaagctggaggcagcacactacctgacttcaaactatactacaaggccacactaacccaaacagcatataaaaaccatggaacagaactgagtcctcagaaataacaccacatatctacaaccatctgatctttgacaaacctgacaaaaacaagcaatggggaaaggattccctatttaagaaatggttttgggaaaactggctagccatatgcagaaagctgaaactggaccccttccttacaccttatacaaaaattaactcaagttggattaaagacttaaacataagacctaaaaccataaaaaccctagaagaaaacctcggcaatacaattcaggacataggcatgggcgaggactttatgagtaaaacaccaaaagcaatgtcaacaaaagccaaaattgacaaatggaatctaataagaagaaagaaagagagaaataaataaataaataaataaataagggaaggagggagggagggagggaggaaggaaggaagaaagaaagaaaaaagaaggaaggaaggaagcaaagaaaaaggaaggaagagaaagagagaaagaggaaggaaggaagaagggaaggaaggaaggaaagagggaaggaagggagggaaggatggagggagggagggaaggaggagggagaaaagaatactttggtaagatcacctcaggtccaatatgtcatatttttatcaacacaacccagagtcaaaccgactttttaaagaataaactaaatttttcaaataagagatttcaaacaactaaacaaatcacattttatcttatgtttgagaagcctattataatttttccaattacttggctatactggtttattattttctattctctctctcattttttatctgctttattgtttggtaagataatattacataaagagagttttcctgacttttcaatctaaatttctatttttttcaaattctccaatcatttccaattagtgcagaattaagatagattaaggattgtggctgggcatgggggcttatgcctgtaatcccaacgctttgggagtccaaggcagtcagatcacttgaggtcaggagctcgagaccagcctggcctacatggggaaaccccatctctactaaaaatacgaaaattagccaggtgcggtggtgtttgcctgtagtcccagctactccagaggctgaagcaggagaattgcttgaatctgggaagcagaggttgcagtgagccgagattgtgccactgcattccagtctgggtgacagagtgggactctgacccccctccaccgccccccgctccacacaacaaaagagtaaggattggaagatacaagccggcaggaacttctcaacaaatacaggatctctgtaatgggatctactaaaatagaatacagtaagtcttcctcatgaaaaggctcatgggaaaactgtctagctgcctatcaggagtatgttcaaaagaaggagtaggggggttgaaccaaataatttctgaaaaattttcccctcaaagtttaagaattagagttagtttaatgacattatttttctagcagaactaaaatatttatttcaagctgtttccacatttttttctaaatttatattatgcctattaattactttcttaaatctctgtcactgtcttccctgaataaaataaactggaaattttactttactacctaggctgcccccttttgtctttcatgcgcaacactgaatcacttttgtcttcccatatgtactccacactttgtttttgggcttagctcagagacaatggtttcaatatgatgattttacatattttatacaaaatatgtaaatggacattgtgccaattttcctgagaatttctcaaggacagaacaagactcatgtttaaaatttctctaccaagattaaataatttctctcttaaaagactcaaataaagcctgttattcaaaacaaagtgcctagaaccaaatgcaaggtattttttttgtgaaaaaatgatgaataacatttttgtttgaaaaagcaatacctttctatatagtatccaataaattattggttttcgttagttatatctaattaggaaggcttaattcccttttaacagttggatttcatagcattttatgtccagctacattaagaattaattttttggcttggcaccaatgctaaatttgcttatccaaagagaagccatgccagcagcttgaaggatgatgacagtaattaacccaaatcatataccagtagctattccaatgaaagtgtctgttaaatagtgtatctttctctgatgctgaggctgatcctacaaaggacatgcactgcaacctcccacagaatgtttctggatactcgttccagagataggaagggaagaactaccaggctgtccaaataaggcgtttcttattctgaaaaatacaatggaaaccatgaagaaatgggggtttctcataatctgctgagaggtgtgtacatcagttcagcatttctagaggtcagtttaatagtggatacatcaaatgacttgtaattgatcatgtcgcatgttatcgtgtatgggaatttagtacaagaggcaataaaagatgtatgaaaagaatggtcactatagcaataaagtaggaaaaaaaaatacaaccactataagcattgactttgttaaataaatcatatcacggtaaaatgataaaatattatgttataaaatatagtggtgttatagaagaatatgttttttataaattgggttataactgtgtaattttcttaaaaaagtatgaactggttatagaacaacattatcaatattattaatattgacaatcatattaataattacaatattgacctatatcaatataagagcaatagtaatataagttatatcttatacacattatataatataacataatataagagcaacattaacaatattatcatatcacacacaaagagaggcaagactactgaaatattcacaagcgtgttaccacagattgtctctgaaatgtaggattgtaaatcttttcttctccttcttttcctcttctccatcttttatccttttcctcctccttctcctcctcctttcttctcacttttcttcttgctgtttgttattttctaaatatttatccaatgatatgatttcagaaatatttagaagacgaaattgacaaatacttggtgaatagatggaaatgtcccatgatcaagacagaggaagtgttgtggctccttgcaaagccagagaaaacactaggggagagaggaaagtaactggctcagttaaggttgtctatgatagaaacaagcaaagaaataaagtagatgtcaagaaagcatttgacacatggatctggagctcagggaaaagctatggactggagataccaatttgaaaatcatccacaaagaatcaggttattgaaactatgggagtggatgagattgctcaggatagtgtgaagcatacaaaggaaataattcctagaactgagcccgaggaaacataaacattggagggaagacagagaaaggaacctaaagagaaactaacggagggccagaaaggtggaaagaatatgaaagtacagtggtgaaaagaagtgaagaaggagccctttaaacaagtgagtggtcaacaatattaaatgtgatgaagagtttaagtgaaataactttcaaagtgtctaatagacacagcaataagtagtttactagcactcttgatggaaacaatttcaaccaggtgccaaaaactttaaggaggaaaatgtggtttgacagaaaaatatttggttacaaaagggcagcaaaaagtaggatggtaactgaataaggagaataactgttgttgttgttattgttgtcgttgttttgtgatggttttaaaatgagaagaatgagttgttttctgtcagctgatgagaaggagtcagtagaaaggaagaaggtgaagataagagaacaactcagtgtttttcagacttgccttaagatatgatccctttctatcatttgtttaaaagatagatttctagaggagaagtcttataacctgtatttttaactgtctgtgtttgttacaggagagaattgggaaagactgggtggaatgcaataaatgtaaaggtttggtgactgacttccttgtcttctgtttcctccatgaagtgggatatgagtccccttctgagagtcatgcaaggatttctaggcactgttaagaacccacgtagaaagaagatgttaagtgacggtagaaccagttttcagggttgcctgattttttgaagcagcacttcacagaagtcgaggtgaccaggattgacatgcaagttctaagagacaggttagaactcaccttttcttcatggaagaaaagcagggaatgggggttcaaaaatattaccaaagattgcatgaaatgataatcatggagaatgcagggaaaagagagcgaatataggtttgcctgggactcaggaattctctagaagttggatagtcaatgctaaaaccaggtaaatctcaggtaaagcaggatcattgattatccaagacagcaaagatgatagaaggctagatttgggaatctaagtaaaataaaaaccaaatgtagtgagaataactgaatttaaaacttataaatagaagagattgtgatcagagattgaaatacttagagttgggttttcagagatgggttagttctaagtaataagattcatggtttaaggtcatgaaagttgatggccaaagtgtggtgcacatgcaggacatggagctatgaagatcatgaagctggaaaagagattaagtttaatacagtttttcatgtaatctatgacattacccagggtggtggcagaacaaaatgagaagagtaaccgtgatgttagttcatcttctgacatagcaagaagtgagtagatgccagtctaggccaggatgagaagggacagagtatggtacagccagatggcatcagtttaaatgctctaaagacttgattcgagtttaagggataattatttagaagaagcagttaaaaatagaccacaagccctggccctaaattatgtgggatatggtagaatgaagagtatacctctgataagaccaaaaagatgcaaagttattatcggggaaaaccaagttgctgttagagtaagggagtagagaacgatgcaacaaaatggttaaggatgtataatttttttatgttagtttcatgtaaaacctaaaaagcaaacatcgtcttgctttatcaggccctcattggatcaaggaaaacagctctcaatgaaaaaagaaaagatccctgttggtggggtaagcaccagaagaactaatgttatttgctattaaccacctaaacataaaatcttaccttgcattattgataaatactatagatttctcatttaatttgaggagaattgctatataatagtttgaggaagttgaatgaaatggaattgttggtggttagttaggattacacgttatttagttatgtatattctttttcactaatgagagcaactaacattaattgagattttaagggttcagtactgtgcttgacactctacatatacttatgtggtgactactgttcttctaattaacaggtgattcatctgaggattacaggtgttagtgacttgaccaagatcacaaagcttaggaaacgtcagaatagggtttaaattgaggtgttactttaaagtacatctttgaaatgctgtatcttactacgtatttaattgatgctaatcagaaactatcaataagggaacttattcagaaatggcatgtcatgttccggtatctcttggtaatctaattttatatcaattttgcctttagttgaagttctccatcattctgcagtacctccaagcctttggctggctctgggtgtggctgactgtggtcacttacttagggcagaatttggtgagcattggacagaatctatggcttagtgcatgggcaaaagaagcaaaaaacatgaatgagttcacagaatggaagcaaataagaagcaataaacttaacatctatggattattgggattaataaaaggtaaaagaaaatgtaaagctgtttctcttttctttttctgacctaattgattcaaacacaaactagtggcatcgtgttatttcaaataaaatctgggccataattttcaaatatttggggataactcaaatgcatatgtttccactttaccatatttgagagaataatccaaaacttatggtgtcatctacatggctcacattaaatattacacatagttacttaatcttgaaaataattatttaaaaaggtgctgttgtcctcattttacagctgaggaaactgaggcttttatgtaaagtcatgaaagattcaaaaatggccactgtgtatatgtgaaggttgtgggtgatgtgaagataaataggtgtctattaaggggtttaaagcctagtgagcctaggtcacgtatacaatcaaactacatgatcagcattaaacactataaagatagtgaaagaaaacactgtgagaattcagagcaaggggaggctgtattgggttgccatattaatgtgatttctaaggagtacttgacaattgaggggagactaaaaggatgaatagaagtttatcagcttgagatcacagagaaggagagaaagtcatagaggcagatagacaggtgtgagtaaagacagggatggggaggtaagaaggtatttggcaagagtgagggtgccagtttgagtggtcttcaggttattggtagggaaaagtaggggagctaaaggtgagaaggaagattggagatatgtcagagatgatcattgggaaggcaagtggaggattttggaaaattgatgaaggaagtgacatagttggatttgtatttcaaataataaattagcagtgataataaaaagatgggtttttattggagggactaaagtcagagagactaaagtcagagagactagaatgaagcaggggttggtaggaaaagaataatcaagtgtatttgggagtccagaagaaaggtagtctagtatagaaagatctcctatctgatccatggctgtgtcacccaaaataaccaataggtaagaagcagaagagaattgaataaataccgaatgaaagagtgaatgaatggccagagagctacaatggaattggataatagggatgaataggaaagacattacagtgaaaaacctaagaattgtccatttgagggtgagtcaggaaagggcattcattagtcaatcatgcttttgaggtttaggttgggtaactgggatatcaatgatgacaaaaataaggaaaacaggaaaccaggaaaaaaataggaaaccactaatcaaaccagagccttaattagtgaaggacagaaatggtgagttcattgttggacacatttaatgggaagttttgatgaatttttccatttttttttctccagttggcagactaaaaatgcacatctgtaagtctggaaattaggcttctttatctgtaaaatgaggggcttaaactggatgatttctacatttctgtcaaattctaacattctagagctcttagttctacttactcttggaattattctgtagagataatcagtgaacccataggagtagataggatcaccatgaatgaggaataagagccatgagagtgaatgacagattcttgaggggtgtccacatagagctgattagtggactaacttcacagaaattgaacagagataagttcctcgtcagatgatcagagggagagaaggagacagaacaacagccacaatgatgtgaatgcctgctccatgtctggaaacccaggcatgttttcattgttgaagttgaaacaaatgaaaatgcctgtatttgacttgttctgacccacaaaaatggcaatttcatacggcttaagctaacacagtagtttatttagcatgtaccctaatgagggagctctgacactctttacttaaactttgttacttatggtttcagttttatcacttgtaaaggatagatattgtttccttgattacatcaaatatgtgtagtgcatactcaagagtgcaataaatgttagctattatttaacaatagaaaatataaataattatgacaaagccctgtgactggtaagttttggagccggatttgcatccatgtccagcttactcccaagccaatgttcttaaaaactaaattggcatttacatggacagtaatgagacattctacaaacaccaggttctatttcaataggtttgggaaactgagttcctccatgaatctgaaatcttttttctttccttcattaaaggttttgagatattctacaataaaatgacctgtttaattctgtttagcacaatgctcctcaaatttatttgaccatgatttttttccttgtgttgctcattaatatcttggagcaacttgtgttccacagaatatactttgagaaattccaaactgtgagcattgccttccaagaaacagaaaagtatgatgtaacaaaggcaaaaaaaaaaaaatactgtttgaagtaaattctcagtagttctgaaatgttacatatctattaaaaacaaagaaaattaagaaatgattcttgattatagtaaaggaaacatgatcaagagagaaatggaaaaagaatatagattgtagttaattgaataattgtttggaaaattcaaaagtatagtataactaaagggaagttttttttagagataatttcttgtgtttgtatcaagtgaaacaggtgcacctagagtgagactggtagtaacgcaaataagaaaataatagagccatctatgtggaagttgttatatcttcatattcatatccatatgggaaaacagagagagatgcatgattttggtaatggaaaagtcagataaaacaaaaactatgaaacttagaaccttgcttctcttttctcctctcttatttttactgtctggccatagtactgcttgtaactgtctccatttaaaaataggcagatattatgagacagatttatgtttgttctgtcattttgttaacattcactgggaaaagagatgttcataacgaaaatgagatataagaattatctggagtatggaagaacaggactttacaacttctttgcttttgagtcagtgagagtcagatttattgacttgcagtttgcaactcagtgaggaagatacagatgtagaggtctcaaattatagcaagagaaacatccatatatacatgaatctccgtatctctgcatgtcacatgtacatatgaaggctaaattcacaccaattcagtgaaattatgttacagctttagagtagatgcaataacctttgaagaacattttaagtgagtaaatagcatttctataacatataaagtatgcaattttagtgtccataatattacttatgtaaagccttaattttaattaactgtcagtaaatatagaaagagtttataaccaaagaaacagattatgaacagttttatcataaagatttttttcctgattggcttttgtttagagtggtctgcagttgttagaatattaatcttccctgatatattgctgcttcacattttttacatttaaaaaatttttaatttttaaggcttattaagtgcaattgcaaattatgtttccataagtaaggtgagcctagaaataaaaatctataatttctgggtttttttgtttttttcttggtagaactcagctctcttatggaacctgatttaattgagagcaggctatattcactgacatcatcatagctcatttatattttttattttttggaactttaaagcataaacagcactttcacatgttaatactagaggcccactacaaaaaatatagaaggctagcattcaaacaaaactggagaactgaagctgaaaatgctacatccatattttatgacactaataaagatcttacctcattttttaaaaaagaaattgccctgaatagtttttttccctgagtctcagctattcgcttcaaatttctaggatacttggcacatttctaatgtatcgtgttttatgtctcactgttgggaacttcctttctccgatccaatgtgtaaaatataggcaccttattttcaaagtgtgatgattaaggagcacactgctgcttccagtttaagagggctaagtggttcatttactttacttacctcactaaattccactgaaaggacagtgaataaatataaaaggaaaggtgtaaggagacttcagagtaatacatttctatatacgggaatatatatgggacagaaaatgaagggtagaagaaaacctgtagccaggaacagatactggagaagctggagcagaagagggagatgttcagttgagccatggaaaaacactaaacttatgttcacaggtacagagggaagaattgagtttcatggaagtaatcaaagtaattcattagaacgttgttctgatggcccatcagcctcttttagaacaacgctgctaccaccaccaatgtatacagccactgtgatagtaacagtatgatgaaaactagaaagctgatgtttaaagaggaaattagggtttctagcatgtgtgacacagatagaaggaagcctccttattgtggcttttggagaaggctcagccaacttgacttgcatcccagtatgaagcctttcagggtcataccttcccacttaagcagaacttgaagcaaactcttccattcaggggagagaaatgttgggggaaattaacatatgcaacggcagaagaaagtcacatcaggtacctatattaattaaccatgtctttgtctcatatttttaaactgataatgcccatccagggaatacatttcactcaaaccaacagcataaataaaagtcaacaaatacagcagtcaggcccagaagtaaaacaacaatatgtggaatacaattagaccttcaaaatgtctaattactgctttcagagattcaaaatattgcatccatgaagtcaatgtggaatgtgctaaaataagttcagcctgagaacaagaaagctcttgaaaacattttaaaaggttgtacaaatgtaacataagttagaagaaattatcccaaatgtacaacattataaacagagatggaaaatgaaagataagaaaaaattacaggtacagttcaagaagtttaacatgtatataaaaagtttcagtaaatggggaaaaaatactaagtacataatatttttaaaaaatacttcctggctgggcgtggtggctcatgcctgtaatcccagcactttgggaggccaaggcaggtggatcccgaggtcaggagatcgagaccagcctagccaacatggtgaaaccccgtctctactaaatatacaaaaaattagctgggtgtggtgacgggcgcctgtagtcccaggtactcggaaggctgaggcaggagaatggcatgaacccgggaggcagagcttgcagtgagctgagatcgcaccactgcactccagcctgggcgacagagcgagtctccgtctcaaaaaaacaataataataataaaataaaataaaaaataaaaaacgaaaaacttcccacactgaagaatagaaatgcctgttccagcagcaattctagtttagagcaggaagaccgagagtcccaaggcagtagtttatgttgcagagtgctggtgctaaataagattaaataaacagtaggatatttgatgagtttgagtgtattcagaagagacttttggctattgaagtgtttgggaataaattagccctagttacacagaaaattaagcatacagaaaaatagtgacacaagctacatatttggtgaccttcatgagcaatatgtgtttattgaatatttgagaaaaaatgggtaatctattggaagggaaatagggaagtatgggaggaatggaggaaaataatagaacacacttaagactgagaaagctaatagccgtatgatatattattcaaaaatataaggaaattagctaaaagaacgtaagatggtgagaagcaactagtttgttttgttttgttttgttttaaacatgatacctgcaaaggaacaaggatcatattggcaacacacttttattagcacttttgtatgctagagtccaatggaacagttgtgtatcttttaagactcaagagcaaactggcttaagtaacatggaagtgtattgacacccaaaggtaaaatgcccaggcatcgatttttaaacacacttgatccagaggttcaaataaagtgttcacaactctcttaattttgcagatctacttattttgtgctggttggttttgttcccaggcttcacatattgatggaaatgtatctttcaaagaactttcttctgtttctatgtgtgctaataactgtttttcagcttcttccactaaagctgcaagtttacctgctaagtagctaatgcaagaacaaccctcccatcaaccacttctcaggagcttaggacaccaaaagaattgtagccctcactcattttatgtgtccactgtgggtcaggaaagggactctgcttatcctacggactccagctgaggaaacgagccaagcaccattttaaatgctggcaggcactgtgcaaagggagtaggactgacaccagcaattaaatgttctaactcggaagtgtcatatatcatttctcttataattcatggttcaaaactattcatttgggtctatcaaccaaaagggggccagaaagttcaactctactatgtaccaagaacctgggagaatggaaatatttggctaaaagcactggtaactaacatattgtcccacagaacatcataaaggtaatacgttgctaaacttctctgcattagatcgactttttatcttctgtacatttctgtgtggaacctatgaccacaaatgagagcgttctgctgtagcagcatggcaaaacatcagaaatgtgtatttatttcacatacatcatatattatgtttatatttattttagtctacaattacacattttaggtataatgtttgagttttcagttaaaataatataaatagcttttataattaatctttttacagcaatcttttgaaagctaaaacacaaatttccttatattattaatgtaactgtgataactatgtgagtttaggtctttttgtctgctctggagcctacgtcatcactagaggatccctggctgcctctcgaaccatgtatgttcaactgttaaataatgtactgcacctccccatccagttttttgaaacaaattccacaggccagatcatcagtcgtttcaccaaggtaagcaaagacacaccttattaaatagcatacataaaagtgacccatatttagtaccttatatgctcacttgtacaaaatattatgtgttttatgtagatttcattgttaagtatatttctaagcgttaggacgtatataattgatgtacaacagagtcacattttgtacatataattaaaataacactgaaaaattacttaagaatccaagaaacacatgctttgagatgtaccactctaattcttccacacatcgagtttgagaatcactgctttaggctaagaagggaaagaaaatgtaagttggtcaggcacggtggctcacgtctgtaatcccagcactttgggaggccgaggcgggcggatcacgtgaggtcggaagttcgagaccagcctgaccaacatggagaaaccctgtctctactaaaaatacaaaattagccaggcgtggtggtgcatgcctgtaatcccagctactcggtaggctgaggcaggagaatcgcttaaacctgggaggcggaggttgtggtgggccgagattgcgccactgcactccagcctgggcatcaagagtgaaactccatctaaaagaaaggaaggaaggaaggaaggaagggagggagggagggagggagagaaacgaagaagagagaaagaagaaagaaagaaaaagaaagagagagggagggagggaaggaggaaggaaggagagagagagaaagaaagaaagaaaaaagaaagagggagagaaagaaaaaaaagaaagaaggaaagaaagaaagaaaaaatgtaagtcaatgtggagatatctagactttaaaaacatcctgcctttaagaaaacataacgtcacttatggtgaatggggaatgagttgagattttcagagtgtctctgcttatctgtaggagttttctcattgtgtctactataaaatgtttctaatagaactgtccaataaagataaaatgcaaaccacgtatgtgattttaaatttcctggtagccataataaagaagtaaaagaaaacacaatggaaagaattaattgtgataatacattttatttaacacagtatatccaaaacattattcccaactgtaattaatataaaattattgattaaactttacacttttttgtacaaagtattttaaatctggtttttatcatgtgcttatagcatatctcaatttgcaatagccacattccaagtgttcagtagtcacatattgctagtggtccctatattaagatgcgcaagtccataacctcaaagtgtataaacacatttctatgtatatgtaaaaacatggtgggtgtataaagggaagtgaagataaaacacaaaaacataaatgaaagtacctaacataataaatttctaatgtaatattaaatcaagcttaattgtaccaaagtacatactgtcttttgaaaaattatagaagaatttgatcaccaccattctgtttctcccagaggacatttctgactacaaccctactgatttattatcttttttatatagtaaaatttcaaatgattgagtcttaagcagatgggagtacgggcaggtaaattcaaaacaggaaattccatgtgaatacaatactgttacattgtttggtatatgaaataaccagggaactcccaaaagagggtagaattaacaaaatttcatctctattttttatatcagttttgtcctgaactgagtagttcatccagtcaaggttcagtgtcttagtattccctggcatctctcaggtcataccttgtgccacaaacagattaagttatatgcaacaaagtgtaaaacaggctgggtgcggtggctcatgcctgtaatcccaacactttgggaggccgaggcaggtggatcaccgagaccagcctggtcaacatgacgaaaccccgcctctactaaaaatataaaaactcgctgggcatggtggctcatgactgcaatcctggctacgtgggaggctgaggcacgagaattgcttgaacctgggaggcagaggtttgcagggagccgatatcgcaccactgtactgcagcttgggtgacacagcgagactttctctcaaaaaaaaaaaaaagtacatatcaatgcatgaccttccctttgtccttctctcattcctatttgccactccatctttcagttcataattttataaatgaagattatcttgttttcctgtctcttttgatatgagtaggatccagttacccaggaaggccactgaacatgttcttagttgataacaatgccccaggagtgatttacaaattttgagtcataaataatggtagcccaatgccccaaatactggaattaaaaaaaaacagctattgaattatggactgttttttcatttttgtttttgcttttttgatcaaagtctgactttaattgtataattaattgccatgtagtggtcactgggaaatataaattgcttgatgataagtatcttgaaatcggaacagccttttaattgttatagttgactacaggggaaaaatatatggggatgagcaaagatcatgtagttagatttatttatgaaatcaatagattgtcatacctgggtaaacatttttaattttgccattgaataatatatttcttctttctctcattttaaactgtaaaaagttaaaaataaagtgacctaatatcaaatttttcagggcgtatttataattgatatgcgtttgcattactatttacggctgtgggtgaattgtacattggatattattggaacagttttggtcattgtgggagctttgcccctcttcattctggggattattcccttagtgttcttctatttctctatacaagtaaatgcatacatttttatttgtattaataacttataagttcacaatcaaatatagtttcagacccacttaaacctcctctttgtccaggttctctaagaagcagagtcgaagaaagaaatacatgtactagagattttactgggggaaatgcctgtaaaagataaaggagagggagcagaagaaggctgggctgagcaagtcctcagacagccactcaggctgaatccctgtgattgagaaaaggaaagaagacggattgggtaacaagggtcttggacgacaggacagttctataacaggttcaacaggaagttctcaatcacagttgtccattggagggtctcatgtgcactttctgccagtactcagtcattggctggcctctatgctaatacagcagtggatctatcagtgcagtctcaggggctgtcagtcagctatgctcctgcagcaggagagctggggcctgcatttttatgcccgccacaaaacctgtatgttgtaattttagcagaaaattaatttccctgcatatccaagagagaaacagatactgcctttttgtcctattttttcagacatcacctgtctcttccagacaaacaattgctggaagagctaaatatgtttctcatgatacttacatgatatcttcatattatatcatttgcaaaattatgttactgtaaggcttcagtggaaaacaaaatttcttagcattttttcttcagcaatcaaacaaagcaattttattaaacaatgaaaagaatcaattaaaatggatgtctttattatctttattattttacaagaaaccatgacagcttttggtttaaaaaaagtttatagattcatacagaaatgactcacataaaagaaatttctccagctcgctcctacactgtgacataaaagttcttttcatattcacagatttatacaccttatttctgttcccacaactttttttgacacttataccaaggtactagtcaaacatgcaagaactataaatagatgaatttttcaaatgtatgatatcaagagattattattataaaacattttaggcatctttttacattgcctttatcgaagtatgtgcaattttttattacaggctgaatccgcaaataaagagtgaaatttaaagacagttgcagaaataactatttcccatttattttatttatcttggcaataaggacttcagtaaaagatgaaattagtttaagtaaacagaaaaacaaaagtagattataggtgtaaatggagctcagattgaatccaaaataatgaatgtatgtttttccactccgtattttagttgattatcctcaaatatgcaatctactatgaaaacgtaatccttacatttgttggagattttaaatgaagtataaaatacagagaaaattacccattatttctaaattttcagtgaaattcctatattaaaataatatttattccaaagcatgatttctttatcctgatagtttcaactgataacatacaaggtaaaatcaatgctgaagcatattttaaatatagaagtatctgaggctcttttcacaaaaagattcttagaatttaatgcttttcaaaaacccaagttttaaaattcatgttagagtttagtctgctcaagccagactacaaatgattttctcatttccttacctatactccattattcttcctacttcacatcttttccctgttctttctgtctgtcccgatcttacttgacattgatggcctaggtcattttccattttctgtgtggagcattctctatcacaatagtgcaaaaagaactgactccttatctactattctaatatctactattatggatttattacactgctggcatatactgatggtataataaatccagaatatatgaaaatgtaagtgctctgggggcagagactatgttttatatatattgtaaaaatctagaaaaaaagcactcatgtggcaaatgaaattttatgtgttggtctcctgtctggtaatctataacagagttatcaggagtaaaaaggagtctagagatcatgtctcattaggggcagtaatataggatgaggtctgaatttggatgcaggaacttggagttctagtcatcttccttacttacctgcctgggacatcatttccctttctaggctctatttctttcccctgtgaaataaaaggtttggtttggatgtgtgctgtgtaaagtgtagttcctggacccatgggccatagctcagacctattgggtcagaatgtcccaaggtagagcccagaaacctgcctttcaacaaacccttcaggcagatgattcttactaaagtatgagaagcattgatctagataaaatttcttaaaccagattccccagagagttgcatgaaagaactccatggattctacaattcactgaaaattgatcagaagctccaagtgtgtatgcgtatttgcatttgtctagggaaagcattttacccttatttatctactcacatggtctgtgaccccaataacatattccctaatctaggcaatctaaatcctttacagcctcagaatgccatagtcccctgtattcttcagagcacttagcatagagttcagttgtagaccaccaggctgtatgtaacctgagatatggttttgtttagcttgctcagtgtttttaccaaatgtagacattttaaaatctgggattttacataaaattccagatttaaaattttcctgaaaattgtgcaagaccgcataacttttgattttcatttccagttggtagcaattttccggggctgattaataatccggttaatacagggcatgctccatccagctcccagcagtcttacctatcctaattgtcctcaacttcaagccaaggggaaatagataacttataattgtgactgtagtggaaatatttgaagaaaaaaataaaaaatattatttttctataattatgtttaagtacaaaatatcattgtgcatttggtctgcttccctcattcaatgagttaactgttcggtcacatattcaacatgtaacatagagctttcttcatagaagggactcaataatggtcatttgagagcactgtcgaagtgaaattttgcccaattatgttcttgttgtgctgtccagaattggcgcttttttttttttttgacagggtctcactctgttacccaagctggagtgcagtggcatgatatgatctcagctcactgcaacctctgcctcccaggttcaagcgattctcctgcctcagcctcctgagtagctgataccaccggcagtcaccaccacagcaggctaatttttgtatttttggtagaaatggggattcaccatgtcgcccaggctggtcttgaacacctgagctccagtgatctgcctgcctcagcctcctgaagtgctgggattacaggcgtgaaccaccgctcccagcctcagaatttgggctttttaccatcacaagggcacatgagtttcctaaggctcctctaacaaagtgctaccaactgggtggcttaaaacaacagaaatgtattctctcacaatttttaaaaacctgtttgttttattttattttatttttatgagacagggcctggctctgtcacccaagctgtagtgtagtgccacgatcatagctcactgcagtctcaacctcctgggctcaagtgtcaagtgatcctcctgcctcagcctctcgagtagctaggccaacaagcatgcaccaccacatctggataatatatatatgttttgctttttgtaaaaacgaagtcttcatatatatatatatataatatatatatataactttttgtaaaaacaaggtcttcctacattgcccaggctcgtttcaaactcctgggctctagcaaccctcctgtcttggcctcccaaagtgttggcattataagcgtgggcaccacacttggcctctctcacagttctaaaggccagaagtctaaaatcaatatataggcagagttgattccttctggaggctttgagggaaaatctctttcatgctcctctcctagcttctgctggctgtcaacaatcctgatattttcgttggcttctaaacacatcacttcaatctctgccactggcagagatggtgttttccctgtgtctatgtcttcttttttgtcttttataaggatactcaacattggatttagggtccaccctacatccagggtgatgtcatcttgagatccttaacttaattacatgtgtaaagatgctatttctgaataaggtcacattcacagatacgggggattaggacttgtatctgacttttggggggtcattctttaaatcacaacacaagggtcttgtagtttttgaactattgaagcaatttctgctacatttttccgactgcttctttctgtcttctgattagagatactatgtggcaagctctcggcaaatccggaggttgacaggagggtcccgttctcctgtcatttctcactttagtgagactttatcaggagtgtccaccatcagagcatttggacatgaacagaggtttatccagcaatacaaagagatggtgaatgaagacttggtctgtttctacaataatgtaattttcaacctgtaagtcccgttaatacctagcctaggatcaatctcttcttagacatcttgctcactgacttctaaacagacggttttgaaatggcatttcatccaagttttagaagtatgtattaataagacaaatattttccagtatttaatgtacatttaaattaaattatatctatttatattcacatgaaaggcacatactatttaatatgaaaaaggtgcttttagaattactcatgacataattctacattgtgttttatatctttagaatatattttatttgtatacactgttttgtaaaatttttgaatttgaagttataatctcacataaaggagaaaaatgaattaaatagaagttgagcatgtttcaatttttaaagactaattttatcatattaaaaagtatacacaattggaaagggaattgattttccaataggatttaaaaaatgcaatacatcattatagctggtgttattttgcttctaaattcagatcaagttttaaagcaaagttctgcaaaagtaaaatgcattttcatgcagatgaattctttaagttatcatgtgatgatcccatgtttgattgagttccaagtaagttggggagaaaaaagaaagcagctattgctgtttatgtctcaatttcccagaggagagggttagtaccaaatgcaccaaaactttttcatctcagttactcaggaatatattccatctgtcacaggtggctgtctgttagacttgaatttcttggcaacttaatggtgctttttgctgcactgcttgctgtgctggctggcaattctatagattcagcaatagttggtttgtctgtatcctatgccctaaatgtaagtaataatgacttttgtggtatatggtatgtttataatccaattaattaaacactcttcttctttgcttgtctgaattatatattatattaactaagtaatgagagacaaatctggattgccctggaggctcatttccttctctatcttgttagtagcaggaagctagctcagcaattctaagttaacttataggaagaataggctaatactcaaggctgagtgctgaaagaccaggaaactcctgctattctgtagttactcagaagtttcctgcttttctgtcctggtggatttatagagtgttacaagggtagggtccctctccaacacagctggtgtatctcatttgctcagcctaagcaagaagataattctctagggagaatatatttgctgtttctcttcggcttgtaagtttttccctaataaaccctatttgatattacactgcaatgcactagtggtaggatgcatgccccctttgtaaaatagcaaatgccctaaactgcttccacattatgtagaagataagtctaggtgattgtgttatatactcttggtcccatatccaaaaaccttgagccagttgcatttcagaattcagaatttaggcttctagaaaggaaatatgtacatagccatatccagggcctggttcagaagcccataatcaaacactactgcatgtacaccctaactggattaagtaaatgctttgaagagccccatatcacttcaagtcaggtggtctatcaaatgagttggcaccaaactcaagaaaaaaattgcattgtacaagttttttgacttttagaattctgttcaaagttacacccttagagaatctacatttgggaatagagtgagaagaaaatatagtttttttttttaataggggagcaggaatagttagaaagctaggagaatcttccttctgatggaaggtagtgaagaatgccaaagtgtttgcacactattttttttctcatttaggatgcacatttttttgaggcatatcccatcaatcttggtattcatcattccttatacccactatgcacttcttgcatatatgctgaattatggtctatcttatcccaagtaattccattatttatgatattaatgagtttgtatccttaaacacaaatatgcatatgaagaaatatgcttatttctagagctgctaaataataatcaaaagatataaagtatatgagacagtatgtgacgagctctcagcagattcaagaaatgaaaagtgaaactctataaaaaataaagtattatttatattacataaaaaactaaagaacatccattaagctcttctttcctcccccataccccccagataactcattctctgaatttttgggtgaagaaagcatgtgaaattgaaaccaatgcagttgctgttgaaagagtttgtgaatatgaaaatatggataaagaagtaagcacgcctcctgtaatcccagtactttgggagtcatgggaggatcacttaagttcaagagttcaagaccagcctggtcaacatagtgagattctgtctctacaaaaataaagaaagaaagaaagaaagaaagaaagaaagaaagaaagaaagaaagaaagaaagaaagaaagaaagctgggtatggtggcttatgcctttagttcaagctacttgggagggtgaagtaggagaatcccttctgcttgggagttcaaggttgcagtgagctatgatcacgccactgcactctagcttgagtgatagagcaagatcctgtctaataaaaaaaaaagtatgagaaaaaaaaagaggtaagcactcctaaataatcaataaatggattggatgcaggagtaagacattgtaatgtaccataaattgacattaaaaaaaatgttaagcaaacctgcatttccaaattcatatgatattcagtgtttcaatgaaattaaaaccaaaattgctacaaagtggcctattattttatatatcattaaaatagaaataaaaatacttctaattaaattaggatacaccctaaattataagatatatccctacttcaatgagttataaaaatgcaagatgttatcttgtttctaaaaggcgcagtgatttgtcctctactgatgtatagagtaaaaaattcaacttgcaattataactttgtggggattttacagtgataaaagtgtcttaatatagtcaactcataattatttagattctgcacaattctaaattaattacattttattgcttgtaccttttgttctatttactcatcattagtatctctgtgaatgggaagggagaggagaataaatcagtctgttttgttccctctaactgtaatttgggagggtgaagagttatttcaactattgacagagtataatatttaagtttctaaaatattttactcatctggattacttctgcttccaattctattaattaacagggcagataacaaagatgacttgaatttctgttccttcttcaatccacctaggaagctatctttcttttttatcttgtaactcttcctcttttgctcatgaaactgaggaacaggtacctcctccaaagaaaaatctaacatttcccattgcatctttggtaatatttcttcctgtcttctctcagatcttactccattaaccacctcttctaattcgcactcccttgcagttcctctcagcctgtaactaagccaaaatattttctacattctccaactcctacctgaactttgaattttcctctggatttttccccaggtcttgtctttccttctcaaagaaatttcatgaaagattagtctaccttcacaatcttcagttaccaatattcaacttgttcagtctgtcatctcatggctaatatcaaatattatttttctatattttctaaatttttgatcataaaatatatttctttcacattagaaaaagatgataaaaatatgtgtgtacacacatttaaacaaacaaaaatctttgtgtactttgacgcaagttgtgacaaatactgctacaaaaactcttgatgtggaaggataaatgtgttcaaataaccttattcagccctctacacctgtttctctgctttccattacagaaaaattcttttgcaaagttgcctgtacttgcttttctatttcattttctctgattcatttctggacgctcgccaaataggcttttgatcccactattgcactgaaacttgactcatgaaaatcacagcaggttctttctcagtcctcactttacctgatctatcatttgatgttagccgtcactctctttcccatgaaacactttacctcactgcccaggcatcacacattcttgtgtgttcttttacctcgtgcttcctccagtattcacacaggcccctgtcttaggtcttgggcacaactaattagatccaattagtcattaaaccctttgcctagaatgttcttccattggtatccacctagcattttctctgaccacagtcagcaaagcctttcctaactacccttctttaaatgacacctcctccttttcccaaccctggctgtttcttgtcttacaaagctttattatcatccagcatggctgcatatgttatatggttctttttgtctgtccccactacaccccacaagggaaataatttttatctgtttttctcactgcggaacctccagcgactaaaatagtgactgacacagcaaacctttgaggaatgaatgaatgacaagctgtccttatctcagctaaaatttcaagttattttttcttaataacttgataagagatgagaagtcttgctacctcaaaatatttatttctaatattttcttataactagataagtttcaggttggtaacatttaaaactattttcagaaaatcataatatccacaaatgtctttcatcatttatattcacttttgttacctgcataagaattattttgggggtagggattttttaattataattgttgtttaaagtatttattttttgtttgtttttgttttaagtcaccttggataatgtctagaagacctccattacaatggcccaataaaggtatagtggaatttattaattatcaggctcgataccaagatgatcttggtttagcgttgcaagatatcactttccagactcatggggaagagaaggtatcatatatatttcatatgtttggtttcccttttatctgaatgcattcattgttgagtataatatgatattgaatataaggtggtcttttgttacacaaaagtaataaagacatgtggttggtgtgtactgaataagttttccctctataaaaaatacatttcttaattaaattgctcatatactactgtgaaacataactttggtgtacttagtttttacttcctctataaaatgaattgcaacaataagtaaatcgttaccccaaacacaataaatccatatgtttgactatttgtatactcaaagacatcatgttttccaaaaccgttaaaaagatgggaaaatgcttgaaatgcactttagttaacacaagcaacttacaaaactgtcgatagtatatgatattagttttatgttttaaaaagcaaacagagacattagcaaaaatatttttggagcagaaatatttttggaacagacaaatcattctgaaattttcattaccccaatgaattaaacagatttctgttttttctgatgcattttgttagacttaagattttatattagggtaaaccaaccactttaatattctatctgcctaacattcctattaataccaagacacaaatcagcaaccagaagatattgctctttagttctcatggtcatagggaaatgtttaatcactgggatgtttaggacaaaatgattattttggccaggagtcaaaatccttaaacactatttttggctgcccataatagttttaatgcagagttcctttgatatactagggaaatttacagatattcctttggattttctagtctatctggcaaaagattccagtgccctatttgtttctttgcttgtttcaatgaagggaagacagagaaaatctgttttctgaaaatctcaataaaaccattcattatcattgcttcttttgccctaaactttaatgggtagttcaggggtggttcaggaatgatctgtttttcctgggtctgctggggatctttggtgaggaagcaactaaattactcagagctaaaggaaaaacacagattagtcagagcctttccagcaagtaaagagtatttggataaagactggtccttagaagtcacctgacatcttccacgcccatcaaggttagtcttgctgacaaaattggatcccactgacctgacacctaatacatttgttgccagtgcaaaggccttgtttccttacaaaaagtagagtttgtgattatttcattacagattggaattgtgggcaggactggagcaggcaaatccacactatcaaattgcttatttagaagttgtggagagagcaggaggcgaaattattattgacggaattgatgtatcaactattggacttcatgaccttcatggcaaacttaatattattccacaggtaaagcctatgttgccataggctttcttaacccactccaagtaaatctgttgtctttctttttaaaaatctgttccttccaagtctataaattcattgtttgaagccatatcattttaaatggaatatatgaaaaactgctatgtaattgaatcctctttaaacacccttatcataaagcattcttcctaagagcatttatctatttgaaaaaccagttcatctttttgataaaatttccttcataatagtaagtgcaaataaaattcaaataaatagatcagactgaaacacattgattttttttgaagaaaatattactgaagtttttgcttagttgttagagtgtagaattttgactctttttcacttgaagtttagaaacattaaaaaaagaacagtaattcagttagttctcttttctcaagtcctttgatttttccatctgtggaatcaaaggaacttgatcattaaggggcatgcaaactagcttaaaaatatgcctcttaagtcaaagatgaaatactcagctgaaactgggtgcagtggctcacgcctgtaatcccagaactttgggaagccgaggcgggtggatcatctgaggtcaggagtttgagaccagcctggccaacatggtgaaaccctgtcccaactaaaagtacataaattatccagccatggtggtgcacacctgtaatcccaggtactcaggaggctgagacaggagaattgcttgaacctgggaggcggaggtttcagtgagccgagattgcgccactgccctctagcctgggcaacagagctagactccatctcaaaagaaaaaaaaaatcattgtactgtcttctaaaaatctattaaaatactcattttaatatattaaaatgtcatattgtttagacgtatacttgtattcatgcatttacttcaaaacaaatttgagtaaaatctggaattctggaagggaaaaaaattagtggaaaaaaagagacatcagttgttcctctcttatagatagagtaaaatatagtgtcactaggcatcttggtgtagcataaagaaaatgaactcaatcctcttcgaattctcttcaaccactaacttaccttcgtgtggtgtagacaagaactctttggaacctccagctcactttctgtaaaataagaatactaacttctatctttctgagttggtatactgattgataatatatacatactatatttcatatttattatatgttatattatatccttgactacacggcagtaattgtcatcattatttcagtactcattattattttcaataataggaagaggagaaagaaaatcaggagacttatgatgacaatatgaattttagtttattctgactctcttctgtttttgttgtaaatataaaatgaatttgatgactgtattaggtctgataattttgctttctcctgctttgttttctgagtctgattttttaaaatgtatttatgcctcatgacagtaagattatgcaggactatttcctgctttggcaccctgttttattttctggaacccttcaaatgaacctggatcccctaaacaaatattctgatagcaagctgtgggaagtgctggaattgtgtcacttgaaacaatttgtgcagtcccttcctgagaagctactgagatttcagagggtggcgagaacctcaggtaagctgctaagagcagagcttgtccaagttattcattccaagctctttagaaactcgaattggcatccaagagaaatacagctcctgagccaccagggcctgtttaaagtacaccatggccgattctttctagggaagaggaaggaaaagtaaattggtagctctaggctgggaaaccactgactaagagaaaggaaagaaaaaaaaagagcaatgccctatgaaaagtcactatttaattgaatcttcttttgtcaagactactactctaaaagccttgttcctaaaaaatgtaaggggctactttgccttcaccattgtttgttgccttacgatagcccacttcatgtgatcagagaccccagaaaagtgagctagatccctgtaatggcctgcgtggcaagactcccaccaccccttctttgatcactttctccctacccctctgtgtttctgcgacattggcctccatgctgtgtcatgagtttgccaggccaattcacgcctaccacagggattttacatctgctatttcctttacctggaacaagtttttactggaaatctgtaagcctcactctccatgtccttcagttcttgccttaaaattctccagaggatttctttggcacacccatctaacatgcccatcccacatctacactttataccccacttctgtgtgtttgaattcttaacacttattatatacatattatccatggaattactgcatataatgttgcaccgtactcatatacccctcctactatgctttttactcaattatcttgcttattgttttctgtgtccccatgagaatgtatctgctacacagagatttttgtctgttttgctcattggtctaaagtctggcactccctcaagagatattttttgaataaaagaacaaatgaagttgtgggtcagaaaaagaatgaatagcagtatcatcagaattttaagccatgaagtgtgttaccatgaagtccattgttgaaattattattattattattttaacagcatgggacaatggcagctggtctgtctagctcgtgctctgcttcgaaaaacaaaaattctcatcttggatgaagcaacagcctccattgactttgagatggacaagttggtgcagaccacaatcaggaaggagttttctgattgcatcatcctgaccattgctcacagactgcaatctatcattgattcagacaagtgtgctttctttcttttcagaaataaaatcatttctgccaagataaatattgggcatatgaaacacactgattacatgccggtcataaataattatatctgtgctgagagatacaaaattttccctaatgatataaaaggtattttccaaaatcactggaagaaaaagttcaagctaaaagaatattagaaaacttgatatagataatgatatatatagaaggtattttccaaaataattggaagaaaaagttaaaggtaaaagaataattactagagaacttgatatagttcctgaattaactagcacctatattttgtactgaaataactcatagaatagtttaaactttatattagcaggaccaataaaatgtgaggtggaagactgtatgttatctgacactattcttttcacatttcagggtgcatgttctagactcaggaagcattgtggaattcgaagcgcctcagaatttgatacgtcagaaaggacttttctatgaaatgacaacggatgctggaataacacaagactcagtgacaaaaaaacaaattactttagctgtatgttaatttgcctagtaaaaaaacactacagtgcattagtatttaaaaagcaaagacagaagagaaatgcacaagggcaggccgctgctatgagttggcacacacactcataggcaccagagtttctttgtttgtttgtttgtttttgtttgtttatttgttcgagatggagttttgctcttgttgcccatgctggagtgcgatggcttgatctcagctcactgcaacctccgcctcccgggttcaagcgattctcctgcctcagcctcccgagtagctgggattacaggcacctgccaccatgcccagctaatttttgtatttttagtagagctggggtttggccatgttggccaggctggtctcgaactcctgacctcaggtgatctgcccgcctcggcctccaaaagtgctgtgattacaggtgtgagccacggcccccggccatcaccacagtttgtaaccatcctgggctgtacctagatttccctcttccgttcgtgcttaccttgttcacattggccaaaatgccaaatgccacttgtcctttaagtccctgacttctcttgggagttcccttctcaatgtgtcccccgatcttcccctctgccctccagtgtgatctagacgccccttttctgtgctttcattagccccatgtgcatacctttatcatggcagggctcatactccattttaaagtctgctttccccttgaaggcaagtgcccagttttaatcatccttgtatgttatgttcctagcatagttcctttcacataactgatgccgagcaaatgtttgcagaatgaatagctagacattttagagtactataagtacttatttatatataaatggatgtgggctgggcactgtggcacacactcataatcccagcatttagggaggccgaggtgaaagtaaagcttgaagccaggaacttgagaccagcgtgggcaacaaagcaagatcctgtctctacaaaaagtaagtaaatataatgaaaaaaatgagatgggcatgatagtgcatacctgtaatcccagctactcaggaggctgaggtgggaatattgcttgagcccaggagttcaagtttgcagtgaggtatgatacacgatagcactccagcttgggtgacagacaccccatctttcaaaaaaaatgaaaacaaataagttttacaaatatattttgagctattgtgtaatttatgaaatgatgaagaaatcacagaaaaaaataagctagtcagctgctttttggaaagagtaattatatattaacagaattttataattgtttataatgttttatatttttactatttacctttgagtgaagaaaaaacctaatattttctttggaacattattttttggttaatatatatacctcagtgagatattttattacatttatgagaggattgttgatttgtagtcctaatcagattttgaagggctttttctttagtagctttatttaaaggaagcaacattatgtctctgaattgcccttcaaatttaaagtctttaaacttcaataggattttctttcaagaagatattaataaaatagtttaacatgttctttaaagcccatcaaccatttcttttgtcctcctttcttcctctgtatgcagccctgtacaaccttgctctatttcctaagggtatttatgaaaagttgccttaaactagaaaacttgtattatctaaagtctcctcccttaaggatgtaagctacttgaagtgttgtcctgtctttacaatccctgaagtgctttgtaaacattgaataaatagctgttgaattctattaagaaaggaatcaaaatatttcattcatatgagttaaaagatgttttagctccctactcctataattttagtaaatcagagaagctgaataattttaaaatctaatgggaaatcaacagtaacctggataaattgtggtatattcacataatagaatactatctagctaatagaatgaaggtacaacagctactgtgtacattaggcaatttgatgaatctcacaaagaatgttgagtgaaatagccacaaaagaatattgctatatgactccatgattctaattatataatttttttaaaagaaaaattaatttatactattagaagttgggatactggttatccttggtggggagggttataataaggtacacaaggtagacttctggattaatggtagcattttgtttcttgaagtgaatctgagcactcattcagtttgtgaatgttcatcaatctgcatatttagaatacgggtagttttctgcatatatatacagatatacattatcttcatatgtaatacagagtaaaagaaaagcaaaagtaaaaaacacaaaaagtgactaaatcaaagttattcaaagataattttattgttttaagaaattaatattttattcttatttcaattatgtacataaagcttgatcaattattgatgtacactagaagcaaagtacaaagcactcaaaatgattggattacagagaggtagcacgtttgtaataaaaaagattattccatgattgtatgatttgtttaaagattataacttcaaaatagattcataaaataatgataaatttcaatagacaaaatatttaccatagctgatagagaaaaatcctatgtaacattaagttgctttctttgaggataatgagaatgttcattattgaaagcccacaatgtgccaggtaatgtgcaatatatttggaacatgtgtcactttcaattctcactaaataatataagaaaggaattatctgctctattttaccaaatatgatattaagattccaagaggagctggaatctaggtttacgtgactacatagctgatgatgctctttctacttctctaccaagatgtctcattccagaggaaacactaaaaaatagtctgtagttcgaaaaacttccaaaatcttttaaaaaacaggattttaaaccagtatctttgtaagcatattaaataaaatcaaagcttgtggtgggggtgggatccatgcctctttaaatatagcattaggttggaccatataaaatagtcatttctgtaggtcaaaaaatggctgagtaatggcaatttcatttacttctaaacatagccttgatacagaagggtttagaaaacttaatgttgcattttaatatgcatataaatagtgaatagttctacctgatctaaagggactttcttttaaaagaaaatttaaaagctagaatgcaaaaacatagtaaataagagttcaggatctcaagacaggatacctatgtgaaatcccaactcaaccacttaatagttgtataaacttgagtaagttaacatatttctctgtgtttatttgggagtcataattttatttacctcctaagtatgctttggaaattaaatcatggaatacatgtaatcacttaagacagtgtctagcatataaaaaacattgaataacatattggctattatttaaacaccaacactcattgttccttataaccgtagtctcatatttacaaaatcacatcataggacacactttttttttttttgagacagagtcttgctctgccggccagactggagtgcagtggcatgatctcggctcaatgtaacctctgtctcctgggctcaagcaattctcttgcctcagcctccctagtagctgggattacaggcatgtggcaccatgcctggctaatatttgtatttttagtaaagacagggttttaccctgttggccaagctagtcttgaactcctgacctcaggtaatctgcccacctaggcctcccaaagttctgggattacaggcatgagccaccatgccaggacacactcttttttttttttttttcagacagagtcttgctttgttgcccaggctggagtgcagtgatgcaatctcggctcactgcaacctctgcctcctgggttcaagtgattctcctgcctcatctgtgtgccaccacacccagctaattttttatatttttagtagagacggagtttcactgtggtagccaggatggtctcgatctcctgacctcgtgatccgctggccttggcttcccaaagtgttgggattacaggcatgagccaccgcacccatcgcaggacacactctttagtaaataaaaactgcaaaaagtttataaaagcctattttatacacagcaaccttgggataactggagactcaaagaagatataggcctccgtgatgcctaatattatctcagtgagatcaagcaaatatgaggaggcagcagttaggagcttcttctagctccttctagttctcctttcctactttcctggatgcaagcagatcatttttaaatacaggaagtaagaacttctggctgtactgttatcgacatgtcactaaatcttcttatgaaaaggaaggctattggtagttcaagtgtctgctatgctgctgagttaatgggccgaggtaatgggtctgaaccatataaagaattactggcttctggatgattgctatccaggtaacccaggtttctcactagttattttcagaatgcccagtctgagcttagttatcattgttgcccaaaggtagtaaccttttgtttatctcaataatgctgcaaaaagagaaaaggaataggcgtacaaggagaacgtaaaatagatcataaatagaaaattatttttgataaatttgcttcaaacatttagaaagaaaataacacatatgcatttttttgtgtgccaaggaaagtgacataggatcagtttttgaattcatgtttaaacaactcagatcttcattaatgcgcttgtggtgactggtttatggcctttttaaactctgatgtacacagtagaaataatgtggtgatcaagatgaagactaagatgaatgatttagaatgcaagacaatggagggcaaaaggaactaggcataaatatgagtacagcttcagtcaccactaatgccctgtgaacatctgcttctggctttctgtcatgagcatttgtgcaacaatttccagattttacagaacatcttactgcttgacctatattaccatattgtttatgatattggagaggtaacaaacaggtattattagtcatgatacataaggtcttaaaaagtgttgtttcatatattctgtttgactttttagttaatacaggcaggaggaaaatcagttttcttttattccatcttgggcagaagcagaagtccaacaaaggacaatgtgaccaaatgtttaactacgtaagggtcataaattgaaaagtacaagtatgaaaagaagtaaaacaagaagcgtaaacaaccacacggcttattgttctcaggtagaaggaagtcccaaaatagagagtacaaagttggttaaggtggctccatatcacctgggctgtacctatctttgtttcaaacatccatagcatgtttgttgcttagcagttgcaaaccccttgctatctccagtatcatgtctgcattccaagaaggagaaatgaatggtgagcagatatttgtacaatccagatgtataaatttaaaaaaagcccgagtttatacctagtgatttatgcttatatctcattggccagaattatgtcatagagccatccctagctgcaagggaagttggaaaatatagtttttgaagtagggatattgctgctccaaataaaagtggggtccagaagtaagcatgaatagaataaatattgtgatagcatttagcaggatctgcaacaactactcaaagaacttttcaatcatgtcaaaattatcttattagtttagcaacttgggagacagaggaagggtattgattacacctaataattgagacccagtttccagtttccaacagtccatgttaagtaatttaaggtgaatgaactcttaacagaaaaaaaatgtgtttttatcatattagctttacatacatacacatacacatacacacatatatatgtatacatataatatatataaaataagttacagagttacaagtgttagagcatttgaaattttttaggtattttaggtaggccaattaataggtaattcaatgaggtatcaaacaaactgcatttattcctgctttaaaatccaaataacttaatgtgaggcaaatcgtttgtaattcttgtcaaaacaaagcaaatgctttaccaaagcaatttttttttcatagtttgtcagaagaactctcaataatttacagaaattttagacccattgaattaagttctgatgatattggggaatctaacctattcgtggcatccttaataaacccacataaggccatgagcggtggcttattcctgtaatcctagaatttgggaggccgaggcaggtggatcacctgaagtcaggagttcgagaccagcccagccaacatggcaaaaccctgtttctactaaaaatacaaacattagctggatgtggtggcacgtgctgtaatcccagctactcaggaggctgaggcaggagaattgctgtaacctgggaggtggaggcttcagtgaactgagatcgcaccactgcactccagcctgggagacagagcgatactccatctcaatcaaccaattaaaaaactcacataaaattgacagtcactgaactttgttcatttctgtatctaccatatgtattaatcgttatcactttctatgtgccagacacttacaaaaaccaggtgaaataggtgctattgatttcattttgtatttaagaaatctatacattctaaacctgcttgttgaaaacgtaaaggaataacaagcataaatctccaatgttaacattagctggtaaataagaggtcttacatggatattatccaggtttggtaacagaacagaaaaggtactatgggattgtattctgtaatgggtaaggcagcacagcactgggattacaagcatagactggatttgaatcccgactttctcacttaatagttgtaatcctgggaaaactgcctaacacgtctatgccttaatttccctatttgaaaatgcagataatagtacctactcaaatggtggctagaactaaactaaattgattagtattagtaaagtttttagagcagtgccatagtgagaactctattatctgctgttgtgtaacaaattaatccaaagtactttaaaaaaacagaactttaaaataacagaaatgaatgataattctttgccaaaacaagaattatggaaggcaaactgtttataattcttgccaaaacaagaattaaggtctctcatgaggtggattcaactagtcaactgtggctgcatcatctcaagacttactaaggctggagggttcatttcaagaaggctgtctcacatagctggaaattcgtgcctcctgtcagtggggggtacctttctgcctccatgtggctctcatcttctagggtgtctttctacacctgtattcaccagaacagccttcttcacatggtcttctttatgtggcagctgggatccaaaagagaaagccagcaagagggtgcatccaagaaggaagctgatcttttttaaacctaatttcagaaatgacatcccagcacttctgccgtattattcattagcattgagtcattatctcttgcccaaattcaagagaataggattacccaaggatgttaattccacaaggtgggatcattgggtcccacatcagaggctgcctacctcagtgaggcactatctgttaattaagataaatatgaagtattgctgtatttcctcatatatttgagtctctccaaggtcaagtataccgtcattacctaaaggctcatcttagattacattaatcaaatgagtttcttaaagaagcaaaacataatatattgtttttttgtccaaagactaatataaactttgttagagaaatatttattaaccatcaaccaaaggaatcctgttatgcaggattatttactaactagctagattaggttagcttagtttctggctccatcgtggtcagaagccatgaattagtatttagaattctgaagatactgttcatatgctacaagttgtcttttctaaattagagaagccagtggaaagcatataagcaatagaaaggatatagagaaatgtacatttcgggaacaactaggcaacagctactgagattgagtgccttggcatcaaatcagttccatcctcactttcttatttatatgcctgaaaagtatactccagactagtcctgaatgaaaaagtacatagtttaaaaaacaaactgcaaaatggtatttatttacattaaaacatgaattgcctgtatacacacaaatataagaggaacaatctgttatgcacaataactgtaatatttagtacatgttatacacagcagtatctgttaagtcagtggtttgagtgaaaacacagtaccaaaacattcctgatacaaaataagttactcattcacatattctaatcatacaagacacttaatattttaaaagttacatacttcaaataacactggctaaatgtacaactaaagtttattaattttttttatgaaaagacttcagattgttattcataaatgatccctttcaggatgcattatcttttaaataaataaactaaattgacttcaagactatttataaatagcccactaaaatatgattgaagacattccttcattttattaaaggtgtagctatatactagagaatatgctcaactactgcctccaaattccaacactgtcattctaatttgcaaataggaattatttaaattccaacttcaggacatgagatgagctgcctgccctattttgtcaattgtttccaaaagcattaacggattaagagactgtcttgaacatctcaaacatttgagaaattcaaggttttctttatgttttaagctgatcctatatatggagattttgagataaattggaacacttttagaagaccttcacaaagaatttttcaattctaaaatctattacagatttatataaagtccaagagaacatgtgaaatattttcataatgcagtgaaggattcatctttggcatttctccattcattctaaaataagatacttcaacaaacattttatacttttctatctacctactatacatattttctatacacaaaagtatttgattgaaatttgtgttttaacagcaatttcattgctaagaatttttttttagatatgaaaaatattagtaacattcagctttttactatgagaagctgaagttttgatgttgttgaaatgaatttgctcagtttccttttttggtgaccagcatttcaacatcctatcgaattcagcaatggataaagcagagatactttacaataaaaaacaaaaaaaggtgatcaggatataatttttgaataatatgaagcattcctctattaaggaaaatatgtatatatatatataatctgtatccatatatcttcaaatacaatgggtatgacagaaatcaaactgttatattttctttcttggtccctgtggtttttcttaaaggaaacaaacaacaaaaacaaacaactctgctccaaatgccgatttgtagaaaccttgccacaatggcttccacattagatttccacgttacttccagtattcacaaattttttgctttcattacaaactaacctaatgtttgaaaagagtccaagtgtgattatttaaaaataataatagaaaacaataacacagcttttataattgagcacattttcctcattcaaaactaaatatgaggaaaaatctccgtaaaacggaaccaaaaccatttagtagctcaattccatgctatattccccagggcttactgaaaatataaacaaagaaacaaatacagtaggtaattgatgctatttgccaatgtttgcaaaggtctcggataacaaaaataagatagcaatcatggctttattatgacattaacacattcttcaaatgcaattaccaattttattctctaaccaaacagaataatggaaatccaagcagagaatgatgtacaggacataaaggaactagaatataattgggtatttctattatatggtgctgaaacatttgaatacctttagaaataaaataaattcatctattaaacacataaaactcctggagaatgcagattacaagaatatgacacttaacaggatactgaatttgtgaatgtaaatttgttatataatatggcagttactgaatattacgtatgcagcttatgctaataatactgctatcttccaaccactgtaaatacctgacatcaacacggtccttcaagtatagttcaaattattagttacatgtgataatacaagtaattaccagctcctgctaatacaatttagtaagaactgggaatctcataactggcactacttaatgtttatagaatataatgttaagtgcatatggttatcaacctccagaatccagaaaatatagttatccatactcttttaagagagttgtacctcaattttatcattttagagtatttgttagaataggatctctccaaaatcaaacaggatcaatctggtcacgtctaatcctaagacaaaacactatgtaaaattttcctgtatctaaatgttgccctctaggtaaatctgtgatattttagagactttcttttgtggaaaaggtaatctgataaatgggaagagatcatcagacaagttcacaaataaccattatttctgcagaattcagttgaagttggttttttgtaaatgcttattgggaatttctaaagcactgacttggagaggccaagagcctccatcaatccctgcttggatagccactcccgttactactgctaggtcagggtctacagatgtgttgggatcttttccaaagaactcttgaatgacttgacggatccgaggaatacgagtggagcccccaactaaaaccacctcatcaatctcagtcttttccaggtggccttctttcaatacttgctgaatgggtaccagtattttctgaaagaggtcttcattaagggtatcaaagagtttccgtgatatttctgtttcaaataaaacctgactttctccacttttcttatcagaaaggccacgtccaaacccactgttcacgcgatggtcatctgctgaggaaagtttgtcttttggcagttcagtgtcactactgtgaggttccttcctgtcctgctcctccaccgttagtaatactgacaactgagcagattgatgaagagtcagatttaatttgaccatttccacagcttgtctcaatctgtggatttcctctttcctagagggcacgaagccatatgtttgatagatctgtttatataagtactgaagcaatctctgattgaagtcctgtcctccaagtttattgtttcctgagtgaaaaataaaagtttaatatagttatgcatatatgtgtgtatgtatacacgtatgttattatgtatacgtaaaaattatattctgggaataacaaatccctgtttcatgtatcattacaattttattcatacagagactggttaaaaataactgtgttgctgggcatggtgtctcacacctgtaatcctagaactttggaaggctgaggtgggagggttgcttgaggccaggagttggagaccagactgggtaacatagcaagaccctgcctctataaaataaatcaataaataaaaatttaaaaaataatgactgggttaaagctatcttaacccaaataagtactatttaaaaactagtgcacatcagggtcaaaattttaaattatataaaaggaagtatctcttcacaatatcaaataatttttcagtaaatagagattaagaatacagattggcttataagtagctatttaaaaacactgaatgtcattctcaacagaagaaagtgcttcttataatgaaaaagtaggtatttaatctctttttttcctttcattttttcttgcctgattaggacctgaaaaggtctttctacttttctacctgaaaactagataaataatttcaaaggaaaagagtagtgtaatataatttcctggtatttaacttgattagaaaaagagaaaaaaaaatgcagaggttagaatacctgtaacttacaactcaacgtgtcaaacaggttgaatcccttaagctaaattcgacaaaataaaaacgtttaaaaaagggtttagaatgcataatcctatcatttcctagggaaaaatacaattagactttctaaagacatctactttataaaacatattaaatgaaatatactgatcacccttcattttaaagaaatttttcttccctctgttccctttcttcaccatcaccatgaaaagtcctactggctatgtgagccgtaattgggtaactggcaatgtatttatgcgacttataggatgcccagcattttttgagatttaactttttgctgtaaatatatacaaatggtataaaattacatatacagaaaactatcaaaatgaagtcaaagaattctgggggaaaaaaaggatgcattacacattggatatgttaaagaaagcactgcccaaacctcttcaactctccctgcatttttctgtaattttttttttttttttttttttagtagagacagggtttcaccgtgttagccaggatggtctcgatctccccatctcgtgatccacccgcctcggcctcccaaagtgctgggattacaggcgtgagccactgcgcccagcctctccctgcatttttcttaccagacattgctcgggttagaaacatccctccttgtttattcagtaaagacacatctagagttcctccgcccaagtctatcaccaagacgtggaagacgtcagccttgtggagaccataggccatagctgctgctgtgggttcatttattaccctcaaaatcttcagtcctgtaagattggttaagggaagaaaaattcatgagaggatgcgatcaagtaatctcttcccacttacagcatgtttgtgtcttctgtgacatgaactccaccactgagtaataatgagagcagtcacaaaccgaacagaagcatgaaatgggaacagtaaacataggctcttctaaatgctatctttaaaattattctgaaagattacaatataaagaaataaaatccaaggttcagtgcaataagtcattctactctttattaattaacacttaattttcaaaaagtctcccagccttttctaacattcatattctactttggaatatatgagcgataaaaatttaatcattatgccgaggtgggcggatcacgaggtcaggagatcaagagaccctcctggctaacacggtgaaaccccgtctctactaaaaatataaaaaatgagccgggcgtggtggcgggcgcccgtagtcccagctactagggaggctgaggcgggagaatggcgtgaacccgggaggcggagcttgcagtgagccgagatcgcgccactgtactccagcctgggcagcagagtgagactccgtctcaaaaaataaaaaaaaataaaaaatttaatcattatatactatcactaagtgctatggaaattaaagaggcttatgttgagcaggtaaaagatcaggtttctttgaatgaaattcctgctttaaactaaatgccatacttatgagcggtatgcaaagtagtatggcattatgtatcaggagctatgacaacattcaaactctaaagaattattccagagatcataacacccttcacttcagctctctgattttaccacttattctactctggccacactgaccaacttcctatcctctatgtaccagcaaattcccagcttatggctgttgcagtggccatctcttcttcctacaacacactttctccatgcgtctgcatggttaagtattttgctttcttcaaatgtgcttaaatgttactttctcaatgaggtttgcctgatcaccctatttaaattctacaagtcatccatcccctgaccaccaaaagcaaccttgacccattagcctgctcttttcttcatagtggttactttctgatatacattgtatcagtggctctcaacaagacaggattttacctccagaagaaatctggcaacatatggagacatttttcattgtcaccacttggtggaggagggcgctgctagcatctggtgaatagaggctagggacgctgttaaatattttgtagtttacaggacagtcctccacaataaagaattatctggcccaaaatatcagtaatgtagaggctgaaaacattattaaatttaccttttatgctcattctgtgtttccctctggtagaacataagttccatgagaacaaagatttctttctttttttagtaaggccctcaatattggttcaatggcattaaatgttaaatcattaaatgatctatctcagattttacttaaaaaattatattcaccttaacattaacggaatttagaagaaagaattcctcactgctaacatgtgtccattttctctttgagcctttgtcctgtagcatctgattggttcttgttaaatacatattttatattgtgctatagagctttcaaaattataaacctgtataaaaatctatctactttacctacattgatggttaatattatcatcttgattggattgatggatgcaaagtattgttcctgggtgtgtctgtgagggtattgccaaaggagagtaacatttgagtcagtggactggcagaggcagatccaccctcaatctgggtgggcaccatctaatcagctgccagagtgtgcctggaataaaagcaggcagaagaatgtcggaggattagactgcctgagtcttctggcctccatctttctcccgtgctggacgcttcctgcccttgaacatcggactctaagttctttagcttttggactcttgtacctacaccagtggtttgccaagggctctcgggccttcggccatagactaaaagctgcacagttggcttccctacttttgaggttttgggactcagactggcttccttgctcctcagcttgcagccagcctactgtgggacttcaccctgtgatagtgtgagtcaatacaccttaataaaatccctttcatatacacatatatactatcagtcctgtccctctagagaaccctaatacacctaccatatagtttgtttattttgactatggttgtgtggtttgggaagtggtaaaccttactacagaaggttttcaacccaacacaattttgagaaaaatgcatctcagtcaagggtactgttacctgcaaggttagcagcttcaattgttgaatttctctgttttagatcaaattctgctggtacagaaatgacagcattggcaactggcattccaagatatgcctctgccatttcctttaacttcaacaatagtcgagagccaacatattctggggacactgtgatggtctcattacttgtcacagaaaactcaaccattccatttttgtttaaaacctgtgaataggatttgcaaataagtaaataaataaaagagtaaaagcatacagacatacatatatacataaatactagatttcatgagaacttacccttatctttacaaaatcaaaaaatgcatttgaaatctatctagtacatttaccaagattagaacttgttaaatgttatacattaaaatctgtacaatgaatccatattagttttactttttttttttttgagatggagtcttgctctgttgcccacgctggagtgcggtggcatgatctcggctcaccacaacctccgcctcctgggttcaagcgattctcctgcctcagcttcccaagtggctgggagtacagatgcgtgccaccatgcctggttaatttttgtatttttagtagagacagggtttcactatgttggccaggttggtcttgaactcctgaccttgtgatccgctcacctcagcctcccaaagtgctgggattacaggtgaaagccaccgtgcttggcccacactagtttttaataacagcagaataaaattcatcaccacgcacatgactagaacacaaaagattctcaatatatttttgctgaataaagaaagaataaatgatgaaatgtaagaaataaaagttgctcattcaagtatgtaactcagaatcttttccctttttttcccaaatttcttgtttctaagagtaatggatagctgaaagaattttctagtacatattaacaagaataattttagtacatcattatgtacttatccaagaatcaaatctcatttacattcttgtttcccatgaaaacatgtattgtgcattagctcattgtccccgataatgtgggtgtacatttaaaaaactattttaactctaaaaaatactatcctagttttaccaagattctattaatataaataaaaaagagaattaatctaagaaattataagaatgttttctcacttcaggcctcatagttaggtttccatcatgaaaaactgaccttccaaaaagtacttcactagtctggggaaaacataaagaagctacatggacaatattaaactaagatacaaatataccagaaccatcagtgcccacatgaaacaaaaacaacaacaaaaaaatcagatcacttagaaacattaagtagtttttgggtcaataagtaacgtacccaaagctgtaattcagagggcatatatagctttagatgattttttcattaaagattgtaagtcagtaaagaatcccaaaaaagaagtcaaaaaacaacaaagtaataaacctaagaaatgcagggagcaatttttttttctttgaaaacggatgaaaaatttgaacatttttatggctaggtttattcaataagcagcactgatacaactgtctattttgaaactaaataatggccggcatggtgaaatcccgtctctactaaaaatacaaaaattagccaggcgtggtggcacacgcctgtaatgccagcttgggaggctgagggaggagaatcacttgaacctgggaggcagaggttgcagtgagccaagatcatgccattgcattccagcctgagagacagaatgagactgtctcaaaaaaaaaaacaaaaactaattcatttagaatttcacttcatttagaatttcacttcataacttccaagaaaaactccacatggaaaaaagctttaaatgtttaaaagaaaaaaaaagcagcgaaatccaaaccaacaaatacataaacgtattaagagggaaaaaaaagtagcagtggataggatgggataggctacagtaaacatgataagagtctaaaatcaaaaatttaaaactttgacatccagctcaaaaacatcagtgaaaaaaaaaaggtaaggaaaagataacaaaaacatataatgaaggtcttttatagctcactaaggaaaagaaaaacacaccaaaacaaaaaaggacaaagaaaaatggaccataaaagaaaattaaaatatcaataaaattctaaaaattctgatctcactaaaaaaaatcaaaataaataaaaattaatacaggatactatttttcacttatctgactgttaaagattaaaaaaaataactagcgaagatacagccactctaaaaaattatggttaagagcatataacctttctggtgagcaaaccagaaaaataaatcaaaagccttaaaaacgtacacatttgacctatcaattagacttctagcattcaagttaggaaactttcagagaagtgtacaaagataagtaaggatattaccggaatctccaacattagtgaaaaaccacaaaaaagtacactgatagagactagtctaattaataatggaatagtcattccacaaaatcattaaagataatgacatgatcctattaattatccatgacatattaaatagcaaaaaatagcacacctggtatgttctctttatatgtatataaatatgtacacatacacacacagaatatctatctatggtacacagggcttcatcaaccttcctgctaccttgaaagagctaagcaagacatgctgaggatgggacagcaagaaaatggcaaggccttaagtacctgttagcattatggagtcagtgattaactgatcctatagctgctgtggaatttctggttatgtgagataacagaactttcatgtattaatagataaaactagacgagatagaatgttttgtgacatgaagccaaagcattaactaaaagagtacactaaaattaatatagattttagattaatcacttaccttaaatgggtatctgccaatttcagcctccaactcttctgcggtaaaaatcttgcctatgaatcttttggcatcatatattgtgttttgaggatttgaatctgccagctctacgctttcatatcccacatatacatcattgtcagtaaaagacaccatgctgggtatgctgatatgcccattttcatctggaatcacctttacttttcctgtgccaggaaaaaacaccccaacagaacaataggtggtgccaagatcaataccaatcactttaggagtaggcaatggtaaatactgttgtgccaaatagccggccaacaggagagtcaaaacagccgatcctgaaataaaggaaaattaaaagatgtattttatcaaactagtacaatgtactaaattactgtagcaaagtccctttaatatcactcgttgaaacaaggctaaaaaagacaaatttcaaaattttttataggactgctgatagcactcctctcagacagcaagtttttcaaaatgtaaactggttataataaaatttaaaatgaagtaaacacaaacaacaaaaaaccctataactgtatgtttgtgtcattctctaataaatgtaataaaatgtaaaaatatttcaataatatttgtgcagatgctgacaagaaacaacatttatctggagcaaaagccagatataatctaatattcttgatcaattgatatttagattttacagctttataaaaagcttcgattatctttttttaaaagctccattattaaaattctcacaagaaaaactttattattttataagtctaaaattctctcctcgtatctcacctccttttccctttcaaaaggatgaaatgaataaatgggataaaatgattttgaaagttccttagatatgaaactgtcacttcaaaacagaacacagttaactttttatgtatttaagtatgaactagggacttccttcttgcagtggtaatatttaggggagaagaagcataaaggtgggcaaccctgacggcaacatctatgaaagcttcttgaagacaagtttcgttcactgttgtatcccccagaccaggaatagcagatgcccaacaaatactaatttaaaaaaaaaagaaaaaagagtaggaacaaatgccacgcagattgtaaacataagcgaagaaagatgcccctttagtttttaatgaatctcgtatttggtatcaggaggctgtgttatacacctgtgtccgctcatattacatatgacccaaaacatgaattttcagggctctgtgttactaattgttagctcatcctcatcaacacataactcaaagaaataaaaccaagtgcgaatcccactttccacttccagctacaggcaacatttcagaagcatttcatcaccttggagacgcggggtgggtgtgtgtgtgggtgggggataggtaattccaaacccgatgtgatggaaaaagcctccaaattcagcatccctgagccgacagatccggatgtagctcctcccccttcctccacaaaggggtcctggaggtgcacgttctcgcagccttccatagcttgccccaattcaacaggcaattcaaaaacctaggtgctgttgaaaggaacgcctccctaagcctgatgtccctgggatggacacagctggtcgccgtctatcctaccttggcctgcaggggccggggccctcctagaggcgtccccgcccccatccactccgaacagccgaaaaccgtctctaagtcacctttctgactccccttccgctgctccagctagatccaggaggtgagtcaaccacccctgcccactctggcatcctcagatcgcctctacgcccgcaagagcaacaaggacccccgggaacccacctaagatcgtcatctctctggccatcacagtcccgccgaacaggcttgtgatgactgtaccagacgtgaggcaccgcccccactcctcccggcagtcccgcagccccctgggaaatgtagtccgcttgctctgaggcaatcggagaagctatcgctctgaccaaagcaaggacttcatctaccgtgagggcgcggggcaaagagcctccattcaaccgctgccagtgacgactgagtcccccttccacgcaacggccggcaggaccagtgagactgagggggaggagcgccgtggcgagagactggcgtttataatcaaacctgtggtcccgcgatcctacttgagggaaaacaggctatctctttagccccgccccgcgctttgcattctgggaagcggagttccagcctttctctttccgcgggagggaatgaaagggagggtgagaaccgttagttatttctttctttggtcgtgcccctaatcaggtccaggattcgagtttgtgttctttcgttttaattccttttaaagcgcgttcgtttgcctgagatctagcttctagatggcgttcctatagcctcccggagccccagccatcctccgtagaagggtccctgccgcagtgcggggcctgagggaagtcggctctggcgtccgtgctccaacgctgggagcagccctgaaactccagtgaccctcagccgtctgcctttgttttgggataaatgaattcaagcattcttcagtcaattcgatttatccaagggatcagggacacattttctctattgctagcactgacgtgggccattaaaaacaaaaacaaaaacgaaattaaaaagaaaacccttagctctctcttcaagtaagtcttaagtggccaaaattgaccttatgggcaagtcctgtaacgtgacagccattttaggacgcttgtgacatgctgttcaggttctagtctgaagtaggatttttctcgcatcttggtcactggtagcacttaatgactcctctgagagtggttttgtcatttttgctgttagagttcacgataactaagatcctggagaattgaatccattttctcagcttagatataaatcaaaccatccctgttgacaacacgtcagcctgctgtgggaatacattgctggttatttctgacttatcaatgtgaattttgattatggaagctgaattctggttgatagggatccattgtaatgttctctctacttttgcgcatttttaagtatttcataatgcgaaatataaaaagtgtgtgtctatagtgagtgctgttcaataagattcttataaggagtgaagaattcaagcacttagttcttaagtattacttgtaatgggcagtgggctggaggtgttccaggcagacggaactcaattaccaagagcacagaagcaagagatcatctattccatagattagaaagtggtggatcataaagcatgaggtagaattctgagagacagaactagagacttaaaccagattaagattagccgtctgtgacaagcactggtcattgggattctccctgccactcactcctttctccttgctaacaagatcctgatttgttcaagaagcaggtaaagattatgtgatctcagagtagaaggcctttagaattaagattgaactaaataggttgtattcattttctatttctgccttaacaaattaccacaaatttagtgtcttaaaccaactcaaatctattatttttacagttcggtatatcagaaatttggtatgggtctcacttaactaaaagcaagttattagcaaagctgcattcctttctggatgttctaggggagaatcagtttcctgctaatttgagttattggcagaattcattttcttgcagttgtagggttcaggtcttcattttcttgctggctgtaacctgagagctgtttccagtttctgaggccatacacatatcttagctcagagaccctctttctccatcttcaaagccagcaacagcgggtcaggtcctttacagaggacatttttttgcatcgctcttccaaattttagatgtcatgtgtttacattggacctatctggacaactcaacgtaatctccatttcaaaccctgtaaacttatcatatctgcaaagtccgttttgccatgtaaggtaactattcacgagttctaacagtttgaggaggcctttattatgcctactaaaatggttctgtggcccctcagattcacatctgtccacatacaaaatgcaacatccaccaaagtcccatcccattatagcatgaactcaaagtccagaaagttcatctatacttcatcagttcaaaagtctcgcatctcattatctaaatcaactaaatggggtagtaactgataccacttatcccttcttgtttgtttacaatcagaggaacaatgaaatacttagataagaatgctggtgagactattccagtaatgttataaagaacagaaaagtcaaggcactggggttgggaagtaatcattgttatcattctccaatagtgaccaattaattcgttgtttttatagttattgtttggtgttttatgttacaatccattgcaattattatccttcttgatacttagattgctttaattttggccgatggcagcctcttcaaaattcactcatgaatgcttttgacacaatcgctttacttactgccttgctacctgctctaaaaagatatctagaatcctcttatttttttttgtttgttttgttttgtttcatacttataattaactgtatgtctaaggaaccctgctttcttttattaagaaagtgtggtatctggagaccataatttgtatgccagggggttattattttaagggtgccagttctttttatatctttgaattcagtgaaatatcaaataaaaagccagcaggatattttatgacttgataaaatgacaataaaatttatttggaatatttaagataagaatttaatgggtatatagtccttgcgcatgttaagtgacaaaactacaaacttaatactacagaggaaacagaaaatggactttaggctcagcagcagcacatgcttgtagccccagctactcgggagactgaggtggaaggaacacctgagcccaggattttgaatccagcctaggcagcatagcaagaaccctattgcaaaaaactaaataaaagaaataaaaataaaacagacctaagaagaaagtggcaatctcttcaaaataaatgaaagctatattattcaacaaatgtaacagggcagttggctatttataactttgaatgtaaaaagggatattataccttaacatcaaaataaatataaatagataaaatgtttaattaaataactacaagtagttttattcattaacttaggggtaggagaagtctttgaaattaagacttaaaacctagaaacaaataaggcaaaactaaacttaacagataaatttgattatgtagaatttaagattatctagcaggcagaattacctatttgaatttatatgaagtcaaaagacaaatgacaaactgaagaaatactaaacatacatcatgatctataatagatttaattcctttatggagaattccttcagagtataaaggtgtacaactcaattgaaaaataagaaaggacatagacaatagaaaataaaaataaccaacaaacatgaaaatatattctaccttagtcacacttaaataaacataaatcagaataataacatgtcatttctacctatctgtaatcagttgaattgtggccccctccaaaaaaggtatgctggagtgctaaacccctgtacctcagaatgtgactttatttggaaataaagttgttggacatataatcagataatatgaggtcacacagaaatagggtggtctgttaatccagtattactggtatccttataagaaaagggccatataaaggcacggaaacacaaggagaatgctatgggatgaccaaggcagtgattagagttatgtagctacaagccaatgaacgtcaaagattgtcaacaaaccagcagagctacgaagagtcaataaaggattcccctgcatgttttagaggggacatgcccaactcatattttgattttggacttctaatctccaaaactatgagacaataacattttgttgttttaaagccatgcagtttgtgataatttgttatggcagccctaggaaactatatactatcttactggaaaaatatttaaataatgataagcagtgctagtgaatgtgtctgttgctcatgataggcctgtttgtggagtacattttgaaagggtaatattgattaaaatgcagggcacatagacttacatttacagccattattataatgaatagaattattctttctccacagagaaagagatggaaaacagcacaaaattagatgaaataatagtttcagactttggagaataggcagagaaacactatgatccctgagaaaaaagagataaaccacgtaaagtctatagtcatcctgtatttttattgagagacacacatgcaagaccacagtgtagacgaaagtcccaaggagagtatatggccttgccttgtatagaagacacataccagagttcaggcgttttggaaggaggctgaagttgcagcaaagggctctgaagaggtaagcgctatatagaataccagaaatccccaaaatattgggatacctttacttcacaccatacacaaaaattaacttgaaattagttatagatcgaaatgtaagacctcaaaactcaaactacaaatctgtaggaaaacgcatgagagaagatatttgtgatcttcttgtaggtaaagattccctacatgtgaaataaaaagcatgaatcataaaaaagttgataaatagaatgtcattaacattaaaaatttctattcttacatgccatcaagaaatgaaaagtcaactcacgaactgagaaaatatagtacatatatctaacaaaagacttgtatctagagtttatgagtaactcttacaactaaataataatataacagaaaatacctagttaaaatttggttgtaagattgtaatagagatttcataaaagaaaatatactaatagccaataaacacatggtaagatagttaacactggggacaaacaaaaccactacacgtccactacaatggctaaaatttaaaggttgattcactaagtgttgacatagatagggaacaactggaattcttatacatcaccagcaatattataaaatggtaccttaactttgcaaaaacagtttgacagtttcttatgttggtaaacatatccttaccatatgactcagcaatttcacttgatatttaaccaacaaaaataaaaccatatcaaaaaaaattgtgcaaggatgtatgtagcagtttttcttgcagtagccacaaactaaatcatagatccattaacagttgagcgaatagttttactgtacaattgtgcataagaagtattaaaatgtgtccacacagtgacttatacatgaatgatttgggaatctgtgttcctaatggcctccaaacagaagcaatacaaattcagcaggtaaatggagatgccaattatggtatatccatataacagaatactactcagcaacagaaaggaatcattgatgaatacaataacattatgatgagctaagcagaagaacccaggcacagaagaatttctactctgtgattaaatgtataggaaattctagaaaagaaatacctaatacacagtgaaagaaagcagggcagtaatagctgagatgcaaggaggtgattgactgggaagaggcaccagggaagtttttacaatgatgcaaatgttccacatcttaactgtggtagtggtcacatggatatagatctatatttctctacatagatatctccttgtgtaaatacttatgtatataaatatatctctgtcaaactcattagattgcacagttaaaatggatgaattttattttatgtaaattatacttaaataaagttattttgaaaaataaaattttctatacctgaaaactgtgaagaagaacaccagaaattctaagtattctactgctaggaatttataaatattcttatgaaagtacacatcttaattgctcatggcaggactctttcccaaaaaataattggaaatgacctaatcaaccatttatggctctgtcaaacagtggagttataacaaaaaatgaaattcatttgtattgttgtatttctaaaaagtgtttctaaaccgtgttgttaagtaaaatcaatcaaggtttggagcacatattaattaattacacattaatactacttcgagtggatagcctaaacaatatgtgctaatagcataaacattttatgtccactttaatttaatttaagctttaacttattactgtctttactatattttcttatttctattatcttttcatctttgaaccattggttatttagaagtgtgcttcccaatttccaaacatttggtgattttctaattacctttttgttatgatttctagtataattatactgtggttggacaacatattctgtatgattttaatcctttgaaatatattcacacttgttttattgtctagaatatattctgttttggtgaatattccatatctatgtgaaaaatgtgtgttctgccatttctgggtgtagtattttggaactatcatttagatgtattttacggcttctgtatcctagttttgttcttattattgttctaaatgctttatctgtcattgagagttgtaggttaaaacatccatctatgattgtggattttcccaattgatgtgtgtgtgtgtgtgtgtgtgtgtgtgtgtgtgtgctctgtttttaggcaaatacaaatttaagattataattattttattagcatgaaatattcctttttatatttaataatacattttgttttagagactactttgtcccaggatcagaacagaactacacagcaaaatttaaggtgatgcctactctctgataccgactctgcagttgtaggaccctgagagtaagctcccccttaaattttgtgcccaaatgcctcatcctgtaagaggcattcactcttatggcagttgcacttgctttccttgcccttgttccagtcctgatttgtctgatattaatagagtaactccagctttcttttgttagtatatcctaagtacattttccctatcctatatctcttcacccgtttatctccttatatttaacatgtttattgtatggaagctaaatgatgtgtacacatacacatagagtatggaataatagacactgggaactcgaaagggtgagagggtggggtatgtgagcgatgagaaatcacttaatgggtacaatgtacgatattgaatgatggttacactaaaagcctagactttaccactatgcaatatatatcgatgtaacgaagttacacttgtaccccttacatttatacagatttttttttaaatagtgtctcttgtaaatagtatatagttgggcttatgtttttgcagtaggataatatgtcttttatttatagtctttagtcaatttacattaactatagctatggatatagatcaatgcatggatttaagtctatcatcttcctttatttaaaaagtatcattttttttacttctttcctgctgtctttgagatcactcagtattttttattccattttatatcttttattttttcagttaaaaatctttttctttcattgtttagtggttatcgtagtgattttaacatatatctttgacttattacatttagtccttttatcatgtcttgaaggatgcaaaactctcacagcacttttacttatcactccctaccttgaatatttattgttatatgttgtatatgtactacgttatacaccctacaagtaataattattactatttttttgtttgtttgtttgcttcgttttttttgagacggagtctcgctctgtcgcccagactggagtgcagtggctccgccccccgggttcacgccattctcctgcctcagcctcccgagtagctgggactacaggtgcccaccaccacgcccagctaattttttgtatttttggtagagatgaggtttcatggtgttagccaggatggtctcgatctcctgaccttgtgatccgcccgcctcggcctcccaaagtgctgggattacaggcttgagccaccggacccggccaactattgttttaaaggcatcaatattttccaaattttctcacatatttaacttttctagttaaatattaaatgttatattttatttctagttaaatattaaatgttaaacatatttaacatatttaacatttctttcatgttttcatttttgaccattttccgtcagcttgaaaaatttcattaatattttttgtagtgctggtttgttggcaacaacattttttgaggaggggctaaaatatctttatatcatcttcacttttgaaaaatattttctttagatacagaatttgcgttggcagttttaatttcttccctctttttcttttatcactttaaagatgccattccattgcttttgtctggtaaaattatccataaatctcattcttgctttttgaagaagatgtgccttttttctatgcctggtttaaaaatctgtttctccccccccttttttttttttgagaagtttaaatacgttttgccaaatatggttaatttgcatgtgtctctcttgaggctgactgggattcttggatctctggttgttgccttcatcagatttggaaaaattctcatccatagctcttcaaatattgtctctgtcccttttctctttttctgagatttcaattgcgcatgtatttgcccatgtactatattaatttttgccctatatttgttaatacttagttcttttctttccatttcttttctgtcttcaagttgaatttttttctgtctttatgtacactaataatttctttactgtgtctagtcagctattaaacacattctagagtttttaattcatgtattttatatttttcagttctagaatgtttcatttgatttttatattgattctaattgtatgttaaaattgtcttttctttcattccgctcatcgtttattctcttttatttaaatttattcgttagttattttaaagcttttatctgtttagtccaatgatatccatagctagggagaagaggaagtgtccttatatcatctaattttttttcattttctttcgttacgttttccagtttattcagatgcctcgtttctatacatgttagaactatagagagagagaggttgatgttactttcctctcaaacaagattttcccttttctcttatgcaggtagactgagaacgaatcatctcagtacaactgggaatttagccacataggggttggattccaccgcaagtaaaaagttagtccttctctaaagtacagacatgccctgtgtttgttgcagacccctccctctagagggactttatcttttaagcatttcaagaaacaggagttccttctctgctttgcaccaccttagcactcatgtctggggctcctttagattcccctgccagtgtccaccgaaagctctgagggtttctgtttctcctagaggagttctttgcttaaatcaagcttaatctttactatgtgcacagatttggcaaatgctgccatgaagaaaactgttggtctcatctttcccaagaaatattccatctctggaaacagttcatttagtcctctttgcatcctccctacttcgatgtcttacaaacttgactttgggatgtatgcatttttttctatttgttgaagtgggagttgtaacttgtaccctgccttcttcattccactcagtggttaaaatagaccaaaattttaatgagtttattaccttttattggtcctgactggtacaaatactgataaaaaggattttaagatcatattcatacttttggggaatgagagccacaattaattaacaatgtctgccatgagattggatgcaagagtatggcactcatactattcctacttctgtctaattacactatttgtttctgtgtgcaaaaatctttggtaggtggtggatgtgcccaagacacagggaagaaaaagaagtaaacagggaagtacaacacagactctgaaatggggcatcatggaagacggagctttgtcgtcttggtctttgctgtatattcacttcctacaacagtgctaaataccttgtggatgcttaaatatattaaatgaatgcataaatgaaaagagtaaataaagagtgtatatgaaagtatgtagataaaattcttcactaagccttggggatccagctgcttaaggactaagaccgtatctagctccttttagtatttccacagcatgccatggagatacatgtttctgattatatatgatacatggaaattatatgttgttgaatgagtgattgagtaaatgtgtactagggcagctaatcataaatatttctactattgctaaaatgactggatttatccattccttctgagagtttatactgattgcttatattgtatcaaataccgtaactgagggcaatgtttactcaaactaatagcaccattcaaatttatgcaaacaataacactatatctttaaaatgttttcactaaaagctgcataaagagtgtattcaacaacaatagaataattttacaatcttttttcttgcttaatggccatttgtgccttctgacatgctgctagccattcaaaggtcacactaccttgaagttgaagatcaagacaaatgattagactcataaaagacaaatcacgtctttctggacaggtgattattaataattaattagcatttaaacatgtattatttaagttctttttaagttataaagtctttgatttgctaaacagtttaaataatgaataaaacataaaataataatagttaccatttatttaattccataataactgatttgtatgtattataagctttctttctgaaagcagagtttggaggtgggttcataactttctacaaacagaaaactgagatttagagggttagctagggaagaatttaaaattagatccgtcttattaaaaaaacaatctatgttcttgtcttagtcagcttgggcctccataacaaaatacaatggactgttggcttcaaaaactgaaacttattttctcacagttttggtggctggtgggtcagagatcaaggtgttggccaaatgtgtttttttttttttttttgaggattctcttcctggctcacaaatggctgctttccttgtcattgatgacttgatacagagggggagagggagagagagagagagcaaagtgtgtgtttgtgtgtgtgtctctgtgtgtgtttatattagagagagagagagacagagatcttacactttttataaggtcacagtcttgtggtattagtacctcatttttatgacctcatttaaccttaattacctcctagagcctttatcgccagatacagtcacatttcacatcgaaggtttgggcttcgacatataaattctgtgggatacaattcagtccatagcaattctgaagcactataatatactcttttaatttttaaataaagatggaattatttaatatgttatctttcagttgccttctgggtgtgatttacattgtgacttatatataatactaactccctgaaaaactctctgacacataatatctgttgaattaaggagtgaatcccatccctaaaaagaacaagtttatgataatgcagatgtgtgttcttgtatgattttcattttttttttttttggtctccaaagtatatattatgcactatttccaatgcaaatgataccctttaagttttctttctagcaactctagaattcggagaataagcctaaactcagctttggtttcctagacttaattatgtcttaaatatgagacttcagtagtctaattctcttttcatcttcattgtttctcactccaccaaaacaatatttagcctcagcaagatctttagattttggatatgactttagaatatataaataaatactattccaatggctaaaattatttttcaaagctggactagtacagaattacaatggattatagaatatggaaatgtatcagctttcaggtggttttctcttttcaacaaagaaagccttaataaaaatggtattttcaaagaacttacttagtttttctgaacacaatgctatggccttacatttttgcctgatatgatgaaattcaataacatcacaaaataaaagagttttctagactcacctccatacaggttggagacaaaggaaagaagggaaattatgtcaagatgttcacgtctttttgtcctaatcaaatgatctgattcaaatgtttttacagtaacatatctgacattttggtaataggtgttgaagtgcttgcctaaatttagatcaaattaactatactatatacagcaatattcttttgattcaaattgggaggaaacccacgaacttgaaacagaataggatctgttgcctagtacagcagaaagaattctgagtgagctattagaaaagagttccagggtcagttgtgtgacattgattacatgactcttacatgtaaacattgataacatgacactgataacatctctttagcagatatggccttggatattcctttctttctttgaaaatgtaatttcattcctccctcctttctccctcttccttttcctgccttcctttcctccacaaatagttgtacaactaccatttcttaggcactgtgaatacagtaaggaaccagaacgataggattcctgagctcagggagcttatagcccaatcagaggagcccagacctttaacaactagttgccaaaataatgatgtgattttaagtatgataactgcttcaaagaaaagatttacattggtggaaagggggcttttgtgtatgattttatgtttttgtgtatacacctttactctcatgtattaaagggaagtccttccatctttttttttttttcctgtaaagagagagagatttaattggtaatgggccaaaattttaataaagaaaataatacttgtaatgcagtctacagctaatgttaaccttttaaatctatttttagtaaaattcgttttctcttttcctaaaaaaattcttttgccagattctagggataggcataagcttatttcagtgccatctactttaagaatttcaaatgttagcaatgacttattttatttacgaagatgatgagctcagaggactaggtgaaatatatgaggcctaggtttctcttttttgtaaagtgattttttcccttgaattttaggccagctaaaaacattttctttatatagctcattgtaaacaatgtaaacacagcagtgtgtaaagttagaaaacaactcctttcaaacaacccaacttccccatgtggtgttttgacttttttttcctgcatagacatatataacatagctatgcatttttattaacagaaatttgttaatattgtatatattctataatttgctcacctcccttaacaatatgtcatggatatctttccatatagttgtacataatcctgtttcagtctaatacctacataatttcccattacactaatgtactgtaatttgtttaaacaatatctcttattggagactagggttatttccagtttcttagtattattcttatgtaataaaatccttctatgtctgtccttcctttttctaccattatttctgtgtatcacttactagcacataggacagagaagctgttttgcacccagggtactataagagcatgctccactcctaaattattctaattactctgtggtttgcttctgggcctgctcacattttcaaactctgctgtccttgaagatcttttttctctaggggtgattcagaaaattggttcaacttctgctctggacactaccttcttttcctgttgaattactgatttcttaactcaattttgttttcatgcccttcttatgttttatacatacaaaattataaatgtataaataataaaaagaataaaacataatatataatatatatttaagttgtgaagcaaaataataaaatgaacactagtgaatccctcctcccatattgagaagtctgtcaacacaattctgaataccactgagcctaccaatgtgtttcttttctatccttttctattcctgcctccctctcagaggcgaattttatgtctaccattttctttattaaaaaagttttatcatatatgatgcattcctaaacaattcattatttacttttagttttgagttatctaaaaggccccacactggcatcatacagttagggattgctcagaaaagcagaaagtatgtgagtgatatagaccaagggactagaatgtaggcagttatggaactgattagccagtatatgtagtctttttgtttgtttgtttttgcctgtctcagctcacagccagctgtccctgagtctggagttaaagctggagtaaaggtggagagaccaaggagacacacctgtctctcatgacctccaatcttgatgatgtaggtaacttgacagagaagatgattctcttcaccacagagctgagccacacctggccagaatcagggaaggtgaaggaagagatctggagggatttggggaagctgcagggcgggctgctgtcctctgccaagatcagtgacaacgtgtgtgagctgcaactgcacatgaatgttaccaaccttctgagacttaaaattttcaccttctaaatcttagacaaatttcttttgtagtaatgttatttcgaaatcacgctgagaaagcacttctgggccatgtaattccaaattagttatattgacaaagtggcaaggtatccacactttatagatttctgtgactttttctctcaatatttacattgcaagttgttttttgtagctatatgtctttaattttcattagtctattatagtccattatgtgaaaaatctcaaatgtatttttccattatcttgtttatggacatttcaattgcttttagtgttttgctattatgaagaatgctactgtggatattcttctatatttctcgtgatgtaattgtgcaagcatttctctacggcttagaaataggagaactgatgtccaactttacaaaatggtaccaaattgttttccaaagttctttttatgaaatttatacttccaccaatgccatgtagactttttattgatacataataattgtaaatgtttatggagtacttgtgatattttgatgcgtgcaatgtttgatgatcaaaccagggtttctaggctatccatcacctcaaccatttatcatttctttatgttcggaacatttcaaatcttcccctctagctattttgaaatacacattagattactattaattgtagtcagtcaactgtgctatcaaacactagaatttattccttctatcccatgtttgtacccattaaccaacctctcttcatccccattcccttcccagcctctagtaaccatcattctactctctacctccataagaggtagctcccacagatgagtgctaacagtgatatgtgtctttctgtgcctggtttatttcacataacataacgacctccagttccattgatgttgctgcaaataggattttattttttatggctgaatagtattccattcatcctgtacaattgggaaactatttgcaaattattcattgaacaatgtactaatatccagaatatgtaagtaactcaaacagctcaatgacaaaaaaacaaataatcccatcaaaaagtgggcaaaggatcttaatagacatttcttaaaagaagacatacaaatgacaacaggtatatgaaaaaatactcaacatcactaatcatcagggaaatgcaaataaaagacaatgagatatcatctcacctctggtaaaatggccgttattagaaagacaaaaaatgacaagtgctggtgaagatgaggagaaggtggaacttttatacactgttggtggaaatataaattagtataaccattatggaaaacagtatgaaagattctcaaaaaactaaaaaaagaactattgtatgctccagcaattccactagtgggtacttatccagcagacaggaaatcagtcatcaaaagaatacctgcacccccatgttttatattggcactattcacaatagccacatagacttttaattgagctacatacttgccaacacttagcatttatcatgctggtcaatattttctagtctgatgaaagtaaaatgacatctgtttgtgatatttatttgcatttttctaattgttaatgaaattaaataatttttcataagtttactctccattttttattttctataaatgcttgttcatgtaaattttctcatttttctaatttttttctttccaattttaggaattctttatatattttggttactaatgttttacaagttatacatgttgcaaatgtctctatggcttatttttaaatatctttgtaatatctttaaatgacataagtttttaattatataatgtggtcaattttatgattagtaccttttgtatcatttaaaatctcctaacctaccctgagtcattaatacattcttctattttatcttttttaactttcatatttgggcctttaatcaacctggaactgatttgtgcatgtagtgtgctgtaaggatcctatttttcccccatatttataactatgagccaacactattagtgaatagtctaatttctgcaatgttttgcatggctatctctatcacatattaaattttaatactcacaagtctgtttttgagctctctattttgttttactggccaattgatctaatactgttttaattattatatttttataatagtttatgctgttaatcaggacaaagatcttcactttttctctcttcttcatgagtgtgttgactatttttcttccttttattatttatgtcagttttagaaaaaaatttttaagatgattcaacttgattctgagcaaccaacctggctttatattaagcctgtcgtaggcccctggctacatctgtgattttcgagtttatcttcgctgtttcattactggcccaggatttggagtgatgatcttggcatttgctccaaaggcatcactgtctcttggagattcttttgttttttctttttgagttttagcaaacttattttattttttgtcccttacaggtttgcctgaaattctcagtagcccagcatgcaataaaaacaatgtttcatggaagctctttttttttccctagtgagagggagctttgcatatgtaatatacaattctagaagttctccagatttcttatgttgtaaacttaaaactctgagccaaaaatatcatattttgaattaactgttgacctcagaaatgacaatttttacttgtgagttagggtaggtgaaagtgactgaacaccttaacttctgtcatttcctctctactgtacattattgcagaactggaaagaactttacagctaaatagtgaacagcccttaactttctttctctcttatttagaagctataaaccagagatgatttgttttccagataaggatatactaatcaatagtagtgaaaagccatgccaaaatgagagaggcagcctagtaaaatctctatgtcagttatttatgtcaagagcatttaaaaagtaggccagaatgtagagtagcttgaattatatccttcaaacaaagaagtaattaaaacaaacaaatataaaacaaaaacctagcaggaggattatcatgttgttaactattattcaatgtcaggcttcataatgactctaggatactgagaatgaattttgaaattattaattgaaactctgccatttgaatttctagcaagatctttctatcaatacttatcattttcaccatagtagtccactaacattttggcatgcaatcgtttggatgtagtttgaagtggccttcaatgttgacatttagcttcttaagaatgaaacagggacaggtgtcctcaccagataggccaggtgggatcatgcaaaaagcagaatctttggagccagacagacctgccttcacatgccaatacacaatctgagagaacattctccaggtcttgtgagcctcaggcaactcagctacaaaaattgggatcacaatcccttctttgcagggctgttgcaagaatgacataagagaaaaccttttttatgcttagcaactaataggcactcattaatagtagcatagttatcattataactcttatcattattagtgtctactttagattcttgtgtaattcaggacaaattcttcaccttttcctaagcaggattagataataaaaagagacaataaccattcatttgccttgagcaatatttttcctttgatcagggagtggagcaaaagaggtagatgggtaggtatggggtctcattactttgttggttatccatagaaattaaatgtattgcttagctttctttctcatttattgttggcgtagacaccaagtatataatttaattatcatattgcatgtatgaaattatatatgaaccattttccttgtagctgaagtttgaatccgaatattattagcaaagttacccaagtggagccaatccatattagaccacttacgctaaaggctgctgccaaactaatcttttttaaatagtggatttatcaaatctctctctttgaatttataaaaactcatctttttaatgtcctgatgcatcaaatctaaactcttctgccaggctttcaagaatttccctacactgatcccgttctttttagcgaaatattttttgctattccctcagtccaatctctgcctttagtgagatatattctcttcccagaaaccagttgtcaccaggctttgcttctttcctattgcttgtgttcttcccttttcctgaaataactttcgctgagatttccatgtactcaggtccagcctgggattcacatgccctttcagtactaatttccaccatgaacatttccctaactagtttctagatatcccaactgtcatgtagaaacttttacatgactttgggtcttcatgttatgtagttcataactaagtgctgacttttctcatacattattatttatgtgaaataaagtggtctatacaattagaatgtgggtgccttgaaaatagattatcttacagttctgtatctcttataattctaagcacagtattgagcacagagtgttaataactacctgttaattactgagctaactgatttggtaaacaccttttacatttgcccccattgtgaatttagccatgtacaatatttaacttactaagttaatttacactacatgccattttagattctgattgtgattattggtccctggaatatttttaaaatctttgttttcaaaatatgaaattggagggtgctaaataaaacccaaattatatttttcttgccaaaagtatattatccataatgtcttaattaacttgaattatttaaggaaaagggctgtattctcactaagtcaagattctcttagggataggagacccaacttatcctacataatcacccgattagtcttcacgtttgatccctcttaagtactattctggttgctatggacacaccccatcaatcttgataattttataacattaagagaaaacaaacccatatttattagtggcttattataagataaactttaaatgtttctagataatatttgcatttcttttctaaaacaaatatcctaatctggcatcttagatatatctgttttataatttttttcatctgttttttttttttattgcttttcttttcatttctttttttgagacaggagctggctctatcacccaggctggagtgcagtggcgcgatctgggctcactgcagcctttgcctcctgggcttaagtaatcctcccatctcatcctctcaacaggcgcagctaagtttttcttttctttctttttttttttttttttgtattttttttgtagagatggggtttcaccatgttgcgcaggctgatctcaaactcctgggctcaagtgatctgcctgcctcagcctcccagagtgctaggattacagacatgagctaccacacccagcctcatctttttgattaccgtattattctgtactttcagaaaacaaaactgtttcttttttctggttaaggagttgtttgatagactttagtctgacttttagtggcttattacacaaagcagatttgatttaatatatattaaaatgacattatcaaagttgtcttgctggcagaagtttttctccagattcagtgtgataactacactccgttgatttaattattatcattttggtatgaatctcctgtcatgtttatgctgtgaattttcaagagattagagactgtctgtgggagtaggaggtaaaaagtgaatgagcaaatgtattttgagtgtttgaacagtgaaatatacagtgaccagcaggtgtctctgttacacaatgcagatgagattctcaaagcttttctaatattaatcctaccttctccatctaactgaattcacttttcaattttaacatttacatttgctttcttcttcaacaacatataaagaaactcttacctctctcatatctttaatcagggctctgtttttattttcttaaaatgctgtatccaagattatttcttagtgtctaacttctaccctctttttaaatgtttattttaattttttctttaaaatttttttaaaaaaatataatagagacaggctttcaccatgttgcccaggttggtctcaaactcctggactcaagggattcacctgcctcatccttccaaagttctgacattataggtgtgagccactattcccagcctctacccactttgtctaagtttattttgcaccattttatagaatgagggctggcttaagatctttatttagaagccctaagcactgaaaagtttgcaatatcatatctcctcatatgttaattaaataaaaaatagtaaattataaagaaattgtaaggaagtttgacaaagtttaagataactaaaagttaaataacaactacagcagtgttttcttaatatatcaaatgtatttttcttagaagtttggggaaaatatctgataatcctatttttagggaatttctaaatttagtttgccttttgtataacctatgactgtataaaatgaaaagcctagacagaaccaagaattatgcaaaatacccctgccaagaatttaagtcacagaccaggcatgtatgaatggatgaagggggacaagagacagccaaaggaaagcagaggagtgaaagagtacatctagacactgccagtgggcatataatttctactttctttctaataaaaatgaaatctaacacttactcacagtttattatgtgctaaactttgtatatactctcttatttttccctcacaatggccctgctaaattgttgctgtgattaatcccgtagtaaaatgaataaactgaggctgagagattaattccaaaaggttatacagtcagaaatctgctaacattttaaatccctatattgtattttgagaaggtagttcgacacaatatttgcttttcaactaaaattttgcatatgtttggcttagcatttgtaagatttttactaaagaaataatagtggataagtgcaaaagagatctttggagtttttattatagactttcattacattgaaattcctgattaatgctatggaaccagactgactaactcttacaaaaatgtatttgttaagaggctcccaggaagtctccagaagaatgggaaacagattcagtgggactcaagttatcaaggaggaagaggcaagaagcacagttacaggcttgtagccagcagagctggttaggatgccctcagaactccatccctgttgggatgaacaacctctaacatttcccccccgtacttgattcaaagctcaaggttctaagtcccaggagagggcctccaactggccaaatttaggtcacatgctaacaccaggatgtacagtaatgaggagagagaatttatttccactggcttctgtagtagcaggtgatcacccagaattcttctctgctaatacttaaaacagtgagaaagaactgcctcctttgttgaaaattaaggttttatggggactcgacaatgaagctgggcagacaaaaaaaaaagttagggggtaagtgaggtgacaaatgaccactacaacactttaacagtataaaattgaagcatcctgcaattgaggactaattaaatcatgtaacatcaatataataaaatacaaataagcaactacaaatgaaattatagaaaactatttacttatttatttttattttaaatttttgtgggtacatagtaggtgcatatatttatagggaacacgaaatattttgattcaggcataaaatgcataacaatcactccagggcaaataaggtatccatcagtaatatagttgggatatttgtctgcccaaatctcatgttgaaatgtaattcccaatgttagaagtggagcctggtgggagatattgggatcatgggggtggatcccccatgagtggcttgggccatccccttggtgacaagtgtgctcttgctctgagttcacacaagatctagtcgtttaaaagtgtgtggcacctcccccaacccactcactctctcttgctcctgcttttgccaggtgatatgcctgctcctctgtgccttcctccaggaagcagatgctgttatgcttcctgtacgtatagcttgcagaaccatgagccagttaaacctctttttttataaattactcagtctcaggcatttctttatagcaaagccagaacagcctagcacaatcatctcaagcatttatatgttttgtgttacaaacattccaaatgtactcttttagttactttaaaatgtacaacttattgttgactgtagttaccctgttgtgctatcgcacactaagatcatactagatcttagtcgttatatctaattatgtttttatactcattaagcatccccacttctctacccactaaccttgccagtctctggtaaccattattatactctctatctccatttgttcaatttttagcaaatttaattttctagctcccacaaataaatgagaacatacaaagtttgtctctttctgtgcctggctgatttcacttaacgtaatgacttccagttccatccatgctgttgcaaataacaggattttactcttttttatagttgactagtactctactgtgtatatgtaccatattttctttatccattcatctgttgatagacacttaggttgcttccaaatcttggatatggtgaatagtgttgcaataaacatgggagtccagatatatctttgatataatgatttcctttctttttggtatatatctagcagtggggttgctgaaatatatgttacttctatttttagtttttcaaaaattctccaaaccgttctccatagtggttgcactaatttatcttccaactaacggtgtacaagggttgtactgatttacattctcaccaacagtgtatgagggttcccttttctccatgtcctcaccagcatttgttattgcctgtcctttaggtgaaagccattttaactggggtgagacgatatcccattgtaattttgatttgcatttctgtgatggtcaatgatattgagtacctcttcatatacctgttttccatttgcatgtccttttttgagaaatgtctctttaaatcttttgccaatttttattaaattattatttttttcctattgagttgtttgagctccttatatattctggttattaatcttctgtcagatggatagtttccaaatacttttacctattctataggttgtctctttactttgttgattgtttcttttgctgtgcagaagctttttaacttgcttttaaactcccatttgtgcatttttgctttggttgtctgtgcttgtggactactactcgaaaaatctttgcctgctccctctgtgccttcctccatgattggaagcctcccccgaagcagataccgttatgcttcctgagcaaacagcctgcagaaccctaagccaattaaatcttttatttttatttatttatttattatttattattattattttactttaagttttagggtacatgtgcacaatgtgcaggttagttacatatgtatacatgtgccatgctggtgcgctgcacccactaactcgtcatctagcattaggtatatctcccaatgctatccctcccccctccccccaccccacaacagtccccagagtgtgatgttccccttcctgtgtccatgtgttctcattgttcaattcccacctatgagtgagaatatgcggtgtttggttttttgttcttgcgatagtttactgagaatgatgatttccaatttcatccatgtccctacaaaggacatgaactcatcattttttatggctgcatagtattccatggtgtatatgtgccacattttcttaatccagtctatcattgttgggcatttgggttggttccaagtctttgctattgtgaataatgctgcaataaacatacgtgtgcatgtgtctttatagcagcatgatttatagtcctttgggtatatacccagtaatgggatggctgggtcaaatggtatttctagttctagatccctgaggaatcggcacactgacttccacaatggttgaactagtttacagtcccaccaacagtgtaaaagtgttcgtatttctccacatcctctccagcacctgttgtttcctgactttttaatgattgccattctaactggtgtgagatggtatctcatcgtggttttgatttgcatttctctgatggccagtgatggtgagcattttttcatgtgctttttggctgcataaatgtcttcttttgagaagtgtctgttcaaatctcttttcttataaattactcagtctcaggtatttctttatagcaatgcaagaacagcctagcacagtcatctcaagtatttatcttttcttcatggtccaatgtcttaaagagtttccccaatgttttcttgtagtagtttcatagattgaggtctttgagttaagtctttatccgttttaatttgatttttgtatatggctagagataaggatctagtttcattcttctgcttatggataaccagttttcccatcaccatttattgaagagactgtccttccccaatgtgcattcttggaacctttgttgaaaatgagttctctgtagatgtatgggtttatttctgggatctctattctgttccattggtctatgtgtttttatgcccatatccttctgttttggttactatagctctgtaatatgatttgaactcagctaatgcaatttctctagctttgttctttttgcttaggatagctgtggctattctgggtcttttgtgattccatataaattttaggattttttttatttcagtgaagaatgtcattgatattttgattgggattgcattgagtctgtagatcgttttgggtagtatggacattttaacaattttgattcttccaatccatgaacatggaacatcttttcattttttggtgttcttctcaattttttgtatcaattttttaatagtttttattgtagaggtttttcacttattggttaatttctagatattttactttattagtagctattgtaaatataattactttctttttttttcaaattgtttgctgttggcatatagaaaaagatactgatttttgtatatgtattctgtatccagcatcttcactgaatttattagttctaatagtttttggttgagtctttaggtttttctaaatatgagattatatcatatgcaaacaaggataatttgactttttcctttctaatttggataccctttatttctttctcttgtctgattgctctagtgaggatttccagaagagtatttcttgacattgaaaaatgatcattgaaaaattaaaatgacattaaaattaagttaaaataaaaagcaaatgtaatgtatgaatcttttttagaaatatacatatatgtagttgcatacctatagtttcaaatatgcatttctttatggggaattagaaggcactaattctttcttttttttatttctgcttttattttaggttcaagaggtacatgttgaggtttgttacatgggcaaactgtgtgttgcagaggtttagtatacagattattttgtcactcaggtaataagcatagtacctgattggtagtttttttttgttttgttttgtttttttatcctcactcacctcccatcttccaccctcaagtaggccctgttttctactgttctcttatttgtgtcaatgtgtactcaagttttagctcccacttataagtgaggacatgcagtatttagctttctgtttctggattaatttgctcaggataatggccttcagctccatttatgttgcttcaaaggacagtattttgttcttttttatagctacctagtattctacagtgtatatataccacgttttctttagccagtccaccattaatgggcatctaggttgattccatgtctttgccattgtgaatagcattgcaatgaacattcatgtgcatgtgtcttcgtggtagaacaatttatattcctttgagtgtattccaaataataggattgctggattgaatggtagttctattttaagttctttgagaactctccaaactgctttccaccgtggctgaactaatttacattactaccagcatttataagtcttcccctttctttgcaaccttccaaaatctgttagtttttggccatttaataatagccattctgactggtgtgagatggtatctcattgtggtcttgaattgcatttctctattgattagttatattgagcatttttttcatatgcttgttggctctgtgtgtgtcttcttttaagaagtgtctgttcgtgccctttgcccatttttcaatggagttatttggtttctttgcttgtagatttgtttaagttacttatagattctgaatattagacctttctcaaatagtttgcaaatatttgctcccattctataggttgtctgtttactctgttgatagtttcttttgctatgcaggagctctttagtttaattagatcccacttgtcaatttctgtttttgttaccattgcttttggagtctttgtcatgaaatctttggcaagtccagtgtccagaatggtatttcctaggatttcctaatagggtttttatagttttaggttttacatttaattatttaacctatcttgagttgatgtttgcatatggtgaaaggaaggggtctagtttcaatcttctgcatatggttagctagttatcccagtaccatttattgaataggcaatcattttcccattgcttgttattgtcagctttgtcaaagatcagatggttgtaggtgtgtggctttttctcttggttctctactctattctattggtctgtgtgcctgtttctgtactagtaccatgctgtttgggttactatagccttgtaatacagtttgaagttgggtagtgtgatgcctctggttttgttatttttacttaggattgctttggctatttgggctctttttggttccatataaattttagaatagttttgtgtaattctgtgaaaaatgttgttggtagtttgataagaatagcattgaatctgtaaattgctttgggtagtacggccattttaacaatatcaattctccccatccatgagcatggaatgtttttattttattctttttgtggctatcatgaatggaattatgttcttgatttggctctcagcttgagcattattgttatatagaaatgctactgatttttgtacattgattttgtatcctgaaactttgctaaagttgcttatgtggtctaggagcctctgggcagagactgtagggttttctaggtatagaatcatgttatctgctaagagagtttgactttctctctttctatttgaatgccttttatttcttctcttttctgattcctctggcttggatttccagtgctatgttgaataggagtagtgagagtaggcatccttatcttgttctggttctcgaagaaatgcttccagcttgcctattccatgggatgttggctgtgggcttgtcatagatgacccttattagtttgagatatggtccttcaatgcatagtttagtttgttgagagtttttaacatgaagagatgttgaattttatgcatctattgagatgatcaggtagaatttatttttagttctattgatgtaatgaattacatttcttgccttgtatatgttgaaccaacctcgcatcccaggaataaagcctacttgatcatggtagattagctttttgatgagacatactaattcttggtggaatgaaataactctgaaatttccagacagttttcttcttaactgtttgctcttcttttttctcactactctcttattagatcttccattacttatcactcccaggtttatttttgggcagagaggaatcatttgcatgtgtgtgtataagtgtgtagagtaagagatcttccagaaatataacttttcttttccctttagcacttgttttctgtgtacatgtgcctgctcctgtgaatagatgcataggcttatttaggtcttgtggagtgtgctgtgaaaaccttggagaaatattgagtaagatgatcatcattagatttgaaaaaaattggaaattttagttggttctaatctctttgcttacttcataagttaaattactttctctatgagggaagagtggtcatattgctttttaaacttagagtagcactaagaaaataacatttgtagaatgtgtgttttaggcaacttttattataaaagcatgaggtagtaatgataaattcctttttataaatatctctaatttttgcatctaatttaaagccaacttttttgaaatatcacctggtcttgaaaatatatcagaaaagagtggtcttgaaaatatatcagaaaagagtttgaaacacaacctgaaaatacatgtaggatcatgctgatgttggttaaatgattcttctaaggcagtccaaactactaactattgccatgcctcatcatctagatattaccctcacctgtgctgacatgtaacttgtagttgtctaagtgtcttattagtgtaaagaacgtttgtttagaatagatgtaattttgagctttcctgctctccctggtctgctgagattgatttaattcacacaaactcccttagtgcaccgtaagttgtgcaggaagtcacagcttagcatattttgagtttgcgtataatgttaatgagatcagggaggtgggctttacaggccagttagcttccttgtgttcctggtttcatacaagctccatacaattaaattcatttagtcacttgtcagacacatacagcaagagaactaggtcaaagtttgcctttgggtcagtgaaatgaactacctagaaaaaggaatctagttctagaaaaacgaatcaagactaatatcacatttgtcttgtgatcatcacagcatttcacaaaaatttgaaaaaaattcctattgtgcagaatgcaatatgggctaagacatgtcaatttaaacagtgtagtaagttgttagaacatacttgaaaagatttaagtagcaaagaataaaaaatccaggggtgactctgagatctcatttgggtcatatatcattttatcagcctggaagcaagacagaaagtcaaccttccaagaaaaaaattgttctctcctcttttatttttttgatttcacaccctccctaatcccacatttcaggagaatgcaatcatgtgaatgttttgaaatattgtaaatcaaatcatggaaaaaaaatgataccagtttctattcctttttgaaagtcatatttcctgtactatttttattttattttacagaaggcatgttctagaaaatcatagacaacacattgtgcatatatatattatatattttatatgtatatattttgagacagggtctcactctgttgcccaagctggagtgcagtggcacgacctcagctcactgaaacctttgcctctcagattcaagagattctcatgcctcagccccccgagtagttggaacttcaggcatgtgccaccatgcttggctagtttttgtatttttagtggagacagggttttgccatgttgactaggctggtttcgaactcctgacctcaggtgatccactcacctcggcctcccaaagtgttgggattataggcgtgagccaccacgcctggcctacacattgtattatatacttgaaaacaattaaataatcaggagaactgaaccaataatgtgcagattttctagtcaatgtgcataaattaatatatatgtagatgcatgaaaataaagaatccaacttttgtaccactttgcatgtgaaagcagtattggagcaaaacacattttgaacacttttctattttctgtgaaatattttgcaaatgagttttcaagattcttgttctgtgcctctggtggagtccttccttaaagtgacacgtttgtattccaatgtgcaaaaagggaattaatgggcttaccccttaaatttcttaaatgggatactcccagcagaatgcctaaggaaaaactaaataaataaatgaacacacaaaaaatgattatcctcagtctttccaaggccccctcttgcctccacatgtatggatttatgtctcccagatttcacaggttaaagtcctacccccttgtatctcaggatgtgactttatttgaagatagagtaattgcagatgcaattagttaggatgttttcaccagggttcaccctcatccagtatgactgctgccttcataaagcaggatctttggacacaggcatgcacagggaagatgatgtgaagacacagaaagaagagccatctccaaccaaggagaaaggcctgaaacacatccttccctcacagctctcagaaagaaacaatcctgttgacatcttgatttcagacttccagcctccagaaccatgatagaaaaaatttctgttaagttgaaaaaaaaaagattatcttcctgcaaacaaaaatgtaataagttttaaatgcacagatgaattcaaaaggagaaaggaaaatgttatgtgccaaaaatgaggtgccaactgatccccagagtgctaggtgcataaactcaccatgcaggttatgggggtctcagtccttgtaactgaagagttctattttaagactttttcaggggctggatatgaagtctaggatttgactggcctttggatctaagatcagtacacaagccaaaattcttgaagagctatcccattgagaaaaattatatattaaggggagaaaagaggaaaacatctgctagtacagggcaacaagggggatttttctatctgggacctgagtgaaaataaaaatgaaacccaacaagagtggtcttttctgagaaatcaaacccctggttctacagcttacaaattaaggagccaaatttacactttactgctgacactgacactccaagctgaagaattaacataaaaattggtcttgggtgggggatactcttgaatctcttgcagaaggctttgcgaaactatgctggaattagagtacaagattcaggtcacatggaaatcctcccgcaaaatagctcaaaacacaagaggagatttaaaaaaaggggaagtagaacttctagaattttgtataatagaataatctgagaagactgtagaataaggttctgttttaagatgcaaacaaagaaattgaagcaataggaagaaaatactgctttaaaaaaatcaaatagaatttattggaaataaaagtttcacttgttcctaagaacaactgataaggtaaaagaagtgtctttatagattatcttttacctgataaggtaaaagaagtttatttataaattatttataaaagaagttctttataaatcatctcgctttaggcattctgttatagaaacacaaaatggacttaaacacagggaaaactaatctactatggtagaggggagaatacttttgttacttttgcagaaagtgttgacaggaaaggacaacaaggaaacttgctgggctcataaatgttctatattttgatcagtgtggtggttacacaggtatatagacatataaaaattgtatgctacaatttctaaaatttaatgtactatatgtagtttatacctcaagaagaggtgaaaaaacaaaaccatttatcaattgggtttattcaaaaagaagaaaaaggaaataatatctgcaagatatcaaacaaggaggtcctaattctcatttctttcacaaaataatgaataaacaactacatgacaaataaaataacgaagggggagctctggaatatagcgaaagagtagcacaaaccctgtggagcagagcaacctagcatggctgcatagaatagggtgggaaacaccttgtctgggccactccattgcccagtctggattatctcagaggcaagaggtacttccttctgcatggaaagggtgagaaggaagatcccagtcgccctcattattaccacagacaccagcagtgctcaccaatggatacccctgcagtcttcaccagtcctgagcccaacacagggagctgcctggagtccatgctgctacacttacccatgagaaagagccaagactgtgccttctgtcccatgagctgagctaccgtggtttcatgacattttggaattggagttgccactgtgctgcaccctgctgttaggtcctgagtagccattgtttccctacacgcctagggtcttactgtcaccgcatcccaccacctggagcctgggttgcccagcgcgccactctctctgggcctaggttgctgccataagcctgggtccccactgtgccctaccttttcagcagccttgctgccacagtgccctgtctctccagggtgtgggttgctgaggcaccttgccttcctagagactggagttgccactgcactgagacctacacccaggagcttgagttgctttaccacctgcctcccaggaattagagtcacgctgtgctgtcccatgacttaagacctgagctgctgtggcattctacctttccagggaccagagttgcctctatgctgtgctcaacctcctagaacctgaggttctcttgcatcccaccatcccagggactggtgccattactgtgctgtgcactgttcccagggcctgagcttctttggtatcccatcttcccagggactggagttactgctgtgctgtgtcctgactgcctggagtctgagtcaccattgtgccccaccctctgtggctgagctcctacagggtcgtgtccatcctggggtcatgttgctgctgtaccatgcccctcagagccagagttcccactgtgtcctgacataccagggggcttagcacaactgagctccatccttcgtagccctttctgtggcaatactctgccttcacagagactggagtcaccaccgtgctgcacttggctctcagggcctgagctacagctgtaccccacaattccatgggccttactgccactgtgccctggcctttggggcagagctgctgtggagccataccaaccctgaagcctaagtcactgttatgtccacaagtccctagggtctcactgctgctctaaggcctgggccaacacagtaatgtgtctccccaggtgcccaagtgctactatgctgctccctgccccttgggccagaatcacggttgtgccctgacatccatggaactagagttgctgctgtgccccaccctccaggacctgagtggccagaggacccctttacccctaggctgtgctgcttctgtgcctgtctctcagggttcaagccaccattatatcatatatccccaggcccaagccactgaaataagctccaaagtcctagaccctggcaacatgggtgataagtgcatgccaatgccttggtacatcaatttgctctccaggacccaggtgccatggcagttcacaagtgcctgagcccaggaagccagctctgcagtggctctgagcacctgtatcctggaacctagtgccactgtggctgcctgcagtccacattagacttgacaccaaaagggatcctcttggcttggtttccccccagtagggaaaaggagggcgagaggactccaagagtctttgctactgaggaccctaacagtccactttgccaatgccactgccacaaacacctgaaactttagctgttgatgcttctgcagtcttcattaatgctgacctcagctgatggagccacacagagactacactgctacatttttttagaaccagagctatccaatcagtgccattgcacccacctgcaggtgaaagtctttacccactaaaaccagtctttaaagtctggaagagatgactgctccatcaaatgcatagacatcagcacaaaatcacaagaaacaagaaaatgcaaggaaacaacagcactaaaggaacaaaataactttaaagtaactgacctcaaagaaacagagattttaaaattgtctggaaaggaatttaaaataattttcttttaaaatagaaattataaaaagaaccaaacagaaattctagagctgaagaatacaatgaatggaatgaaaaatacaagagtgaaaagcagacttaatcaagcaaaagaaagaatctgtaatcttgaagacatgtcatttgaaattacaggtctagtatccctaatctgaaaatcctaaatttgaaatgcttcaaaatctgcaactttttcagtgccaatatgatgctgaagagaaacactcattggagcatttaggatttagcatttttgggttaagaaagctgaaccagtaagtataatgcaaataatccaaaatccaagaaatacttgttaacttggtgttcttgcaaggatgaaccccatgcaagtgtctcaccctttcaattgtcttgagaattcaaaacactctgttcctaagaatttcagataagggatactcaacctgtatctagttagagaagaaaaaagaaaaaagtgaagaaattcaatgagatttatgggacaccactatgcaaactgatgtatgcattatggaaatctcagagggagaagagagagagagggcaacaaagtttatttaaagaacaatggctgaaaactttctaattttgggagagatatggacatcccaaactgtgaaactcaaaagtccccaaatgggttcaacacaaagagtcctttagcataagacacattatattatattgtcaagagttaataagacacgttatattaaattgtcaagagttaataagacacgttatattaaattgtcaagagttggacagaatttgaaaacagcaatagaaaagtgacatggcacatacagaggaatgactattagagtataagcagatttttcagcagaaaccttatagcctggagacaatgggatgatatattcaaagtgctaaaaggaaaatatcatccaccaaaaagactacctctaacaaagatgtccttcaaaaataaagtagaaataaaagcttttccaaacatgcaataagtgagacagttcaataccactagacccatctcataagtaatgctaacagaattcttcaagcagaaattataggacactaacaactaacatgaagatatatgatgtataaaattccttggtaggagcaagatgacagaaaagaaagctccaccaattgaccgcacacacccttgcaagaacagcaagttaataagtgtctttagagaaaaaaacacctttctaagaaccagcgatcagatgagcactcacagtacctggttttcacatcatatagcagaaagaggcactgaagagatagaaaaagctgtcctaaaccactgatgtcacccttatgtaacccccggcagtggcaaagtgatgcagacagcatctctgggtgatgggggaagaacacagcaattgtgagccattgaactcagtgctgtactattagagaagaaaggaaatccgaaccaaacttagtcgatgttagcccacagagggagcatttaaactagcctgagccagaagagaatcactgaccccagcattctgaacttgagtgcctgaaaacctcaccactgagagctacagcactcagtgtagctgagtaactccaggtaaacttgaaaggcagtctagtccataaggactgcaactcttgggcgagtcctaatgctgaactaggcccagaggcagtgaactgagtgggcatagaacatactgagacaccagctggggcagctaagggagtgctggcgtccccccacccataatccaggctgcacagctcaaggttcgaagagagaccccttccttccagttgaggagaagagaaggaagagtggggaggactttgtcttgcatctgggatagcagctcagccacaacatgataaggcaccagccagagttgttaggcccctgttccaggaactagctcccaaatgacatttctaggcacaccctgggccacaagaggaccagacacattgaaggaaaggactcagtcgtggcaatagttatcacctgctaactgaagagcccttggaccctgaataatcagcagaaagtcccaggtactatattgaggtctcaggtgaacctctgagacttgctggcttcaggtaagactcaggatattaccagctattgttttgtgagaaactccttctgcttgcaaaaagcagagggaaaagtaaagggactctgtctttcattttaggtaccagcacagccacaggggggtagagcacaaagcaggctctaagggtctcctattccaggacttgcctcttggatggcatttctagacctgccctggaccagaggggagcccacttccccgaagagagtccaggcagcatttacaacaagctgacttaagagaccttgggccttatgggaacattggcagtagtctggcagtactccctgtgacttggggtggtagtgcctacagagtgaaactcctctgcctttggaaaggggaggagatagtgggaaggactgcatcttgtggtttgagtgccagatcagctgcaatgtgatagaagaccaggttgacttcaaaggttttgactctagttcctgacccccaaatggcatttctgaatccacctggggcctcagagatctcaccacactgaagggaagaacacaggcctggctggaatggccgtctactcattgtaggggccaagggccttgagtcagtacaagaagtagctggggagtggttacagatcttgggcaagaccctgtgctgcgctggcttcaggtctgacccagcacagtcatagtagtgatagccacaggggtgccagtgtcactccccctctagcttttggtagctcagaacacaaagagagactctgtatgtttgggagaaagtaacaaaagagaacaagaatctctgactggtaatccagggagttctcctggattcagtcgaaaataaccaaggaggtgcttctacaagtctgcaagaaccacagtgctactgtgcttggggagtcccctaaagaagattgagcttagatcacaaaactcaagtcctttcaaatatctggaaaggctccccaagaggaacagctacaaataaccccagacagtgaaggctgcaataaatacttaacctccttaatgcccagacactgaaaaacatctactagcatcagcaccatccaggaaaaccttatctcaccaagtaaactaaataaggcaccagggaccaatcctggagaaacagagacgtgacctttcagagaattcaaaatagatgtgttgaggaaactcagataaattcaggataacacagagaaggaattcagaattctattcagtaaattaactaagagattaaaatgattaaaaagaatcaagcagaaattctggagctcaaaaatgcatttgacatactgaagaatgcatcaaagtcctttaatagcagaattgatcaagcagaagaattagtgaccttcaagacaggctattgaaaatgcatggtcagagaagacaaaagaagaaagaataaaaaacagggaagcacacctatgggatctagaatatagcctctgaagggcaaatctaagaattattcgccttcaggagaaggtagagaaagcgataggagtaaaaagtttattcaaagcgaaaataacagagaacttttcaaacctagagaaagatatcaacatgcaagtacaagaaggttatagaacactaagcagatttaacccaaagaagactatcttaaggtatttaataatcagactcccaaaggtcaaggataaacaaagaattctaaaagcagcaagagaaaagaaacaagtaacatacaatcagaaaagaaacatataacttaagattacgtttatgtcatttgtttcctttctcttgctgcttttagctctaatatgtctggcagcagacatttcagtggaagccttacaggccgggagagagtggcatgacacatttatcatgctcaaggaaaataacttttaccctaaaatagtatatctggtgaaaatatccttgaaacatgtaggagaaataaagacttttccagacaaacaaaagccgagagatttcatcaatatcagacctgtcctataagaaatgttaaagtgagtacttcaatcagaaagaaaatgacattaatgagtaataaataatcacctgaatgtacgaaacttactggtaacagtaagtacacagaaaaacacagaacattataacacagtaactgtggtgtgtaaactacttttatcctaaggaggaagattaaatgatgaaccaataaaaataataactatagcaatttttcaagacatagtcagtacaataagatataaatagaaacaacaaaaagtcacaaaacaggaggatgaagttaagacatagagttattcattttctttttgcttgtttatacaaatagcattgttgttatcaggttaaagtaatgggttataagatagcatttccaagcctcttggtaacctcaaaccaaaaaacatacaatggatacacaaaaaataaaaagcaagaagctacattatatcaccagagagaaagttattttcactagtgcaaaacaggaaggaaagaaaaaaggaagagaagatcataaaacaaccaggaaacagacaacaaaatggcaagagtaattccttacttatcaataataacattgagtgtaagtaaatatactaaactcttcaataaaaagatatagcatggctgaatggataaaaaacaagaccctttggtctgtttcctacaacaaacacacttcacctataaagaaacatatagaccgaaaataacgggataggagaagatcttccatgccattgaaaccaaaaaacaacaggagtgactatacttatataagacaaaatagatttcaagacaaaaactataagaagagacaaagaaggtcacgatttaatgatgaagggatctattcagcaagaagatataacaattttaaatatatatgcatccaacatgggagcacccagatatatacaggaaatattattagagctaaagagagagataattcctgatacaataatagttggagactacaacacctcactttcagcattggacagatcttccagatggaaaatcaacaaagaaacattagacttaatctgcactatagatcaaatggatctaataaatatttaaggaacattttatttaagagctgacaaataaacattttttcctcagcaaatagatcattctcaaggatagaccctatgttaggtcacaaaacaaatcctaaaacatttaaaaattgaaataatattaagcatcttctgtgacaacaatggaataaaaatagaaactaataacaagagtaatttgggaaactatacaagtacatggaaattaaaccatatgctcctaatgaccaatgggccaatgaataaattaataaagaaattgaaaagtttcttggaacaaatgataatgggaacaaaacataccaaaacctatgggatgcagcaaaataagtactaagagggaagtttatagctataagtgcctacatcaaaaaagaggaaaaacttcaaataaacaatctaatgtttcatcttaaagaactagaaaagaaagagcaaaacaaacccaaaattagtagcagaaaagatgagaacagaaataaatgaaattgaaataaaaaaatacaaaagatcaatgaaacaaaaagttggttttttaaaaagttaaacaaaattgacaaactttcagccagactgagaaaaaagagagaagatcctaagaaaaaggacagaagatccaaataaataaataaagtcagaaatgaaaaaaagagacattacaacggatatggcagaaattcaaaggatcattagtggctactatgagcaactctgtgccaataaattggaaactctagaagaaatggagaaatttgtagatacatacaacctaccaagattgaacttgtgagaaattcaaatcctgaacagaccaataacaagtaacaagaccgaagctggaataaaaagtctcccattaaaaaaaaaaaagccctggacctgacagctttacctctgaattctaccagacatttaaagaagaattaataccaatcccactcaaactcttctcaaagatagaggatgaggaaataattccaaactcatcctatgaggccagtattataatatattaaaaccagacaaaagacacatcagtaaaagaaaactacaggccaatatcactcatgaatattgatgcaaaaatcaacaaaatagtaggaaattgaatgcaacaatacattagaaagatctttcatcatgaccaagtgagatttatccctgggatgcaaggatagttcatcatacataaatcaatcaatgtgatacattatatcagcagaatgaagaataaaaaccataggatcatttcaattgatgctgaaaaagaatttaataaaattcagcatcccttcatgataaaaattctcaaaaaaactgggaacagaagaaacatacttcaacaacattaaagccgtatatgacagacccaagatagtatcatactgaatagggaaaaactgaaaacctttcctctatgatctggtacacaacaagaattcctaccatcgccactgttattcagcataacactggaagtcctagctagagcaatcagacaggagaaggctataaagaacatccacattgcaaaggaagaagtcaaattatccttgtttatagatgataggatcttatatttggaaaaacgtaaattctccacaggaaaactactggaactgataaaaggaatttagcaaagtttcaagatacaaaatatacaaaccaaaatctgtactttttgttttgtttttgagacagggtcttactctgttgcccaggctggagtacagtagccattttggcttactgcagccttgatttcccaggctaaagtgaccctcacaccaccttagcctcccaggcagctgagactacaggtgtgcaccaccatacccagcttttatatatatatgtatttttattttattttattttattttattttattttattttattttatttatttttctttgtagagatgagattccaccatgttgcccaggctggtctcaaactcctgaggtcaagtgattcacctgctgtggcctcccaaagtgctaagattacaggtgtgtgccatcatgcctggccaaaatctgtaccatttctacatgccaacagtgaacattatgaaagagaactaaagcaatgcagtcccatttacaatagccacatgtaaagtgaaatagataggaattaaccaaaggaataaaacatttctataatgaaaagtataaaatactgataaaataaatgtaagaggacactgaaaggtggaaaaatagtccatgttcatggattggaagaatcagtattgttgacatgttcatactacctgaaacaatctacagatttaatgcaatatctataaaaatatcaatgacattcttcacagaaatagaaaaaacagtcctaaaatttatacggaacaacaaatacccagaaaatccaaagctatcctgagcaaaaagaacaaaactgggacaattttgttacctgacttcaaattatactacagagctatagtaaccaaaacagcatggtgctgacataaaaacaaacagataagcacatagaccaatggaacagaatagagaacccagaagcaaatttacacacctagagtaagtcactcttgacaaaggtgccaagaacatacactgggaaaagacagtatcttcaataaattgtcctaggaaaactggatatctgtatgcagaagaataaaactagacccctatctaacaccattaaaaaatacaatcaaaatggattaaagacttaaatctaagacctcaaactatgaaactactacaggaaaaatttggagaaaatctccatgacattggtctgggcaaagatttcttgagttgtggtccataagcacagggaaccaaggcaaaaatggagaaataggaaaacattaagttaaaaagcttctgaacagtaaaggatatagtcaacaaagtgaagatacaacccacagaatgggagaaaatatttgcaaattcccaatctgacaaggaattaacaaccagaaaatatatgaagcacaaacaactctataggaaaaaaaaatttaataatgaaaattaagcaaaagatttgaataggcatttccaaaagaagacatacaaatggcaaacaggcatatgaaaaaacgcttaaggttattgattatcacagaaatgcaaatcaaaactacaatgagatatcatctcaccccagttaaaatgactgttattcaaaagacaggcaataacaaatgttgacgaggatgtggagtaaatggaacccttgtacaccattgttggggttgtaaatgagtataatcactatggagagcagtttggaggtttctcagaaaactgaaaattgagttaccacctgatgcagcaatcccactgctgggtatatgcccaaaagaaaggaaatcagtgtattgaagagatatctacactcctgtgttttttgcagtactgtctacaaaggctatgatttggaagcaacctcagtgtctatcaacagatgaatgaataaaaacaatgaagtaatattcagccataaaaatagaatgatatccagtcatttgcaacgacttcaatggaactggagaccattatgttaagtgaaatcagttaggcacagaaagagaaacattgcatgttctgacttatctgtggtatgtaaaaatcaaaacagttaaactcatggacatagagagtagtagaaggatgggttaccagaagctgggaagggtagtggggggttggaggagaggtggggatggttaatgggtacaaaaaaatagtgagaaagaatgaataagacctacaatttgatagcacaaaagggtgactatagtcaataagaccttaattgtacattttaaaataacttaaagagtatatttggattgtttgtaactcaaaagataaatgcttgagaagatgaatgccccatttgccatgatgtgtttatttcacattgcatgcctgtatcaaaacatctcatataacccataaatatatacacctactgtgtacccacaaaaattttttaaaaatcactggtaccggtaaataaatcatcaaataaagaacactgtaatactgtaatgatggagtgtagatcaattttatctccaatataagattagaagatgaaactactagaaatgaccatagctgcaataatttggtaagggatacataacataaaaaatgtaaattttaacataataaatataaagtatgaaaggagattaaaagtatagagtttatgtgattgaacttattaccagcataaaatagactgttataactataaaatgttttatgcaagcctcatggtaaccacaaaaaaaaaacaactaaagtagatatacaaatgattaaggaaaaggattacaaaaatagcaacacatgaaatcatcaaatcacaaagaaatatagcaggagaggaagaaacaaagtatatacaaagcaacaagacacaattaacaagtgacagcagtaagttcttaccaactgataattaccttatatgtaaattgattgaattatccaacaaaacacagaatgaccaaatggtttaaataaaaacacacccaactgtacgcttcctacaagagatttactttaatcttaaagacatacgtaggctcaatgttaaggtatggaaaaatatatttcatgaaaaatgataaccaaaaggtggctataattacattagacaaaatagactttaagttaaaaactgtcacaagagacaaagaagaacattatatgataataaaggtgtcaattcatcaagaggatataacaattgtaaataaatatgcccccataagtggagcacctgaatatataaagcaaatcttaacagatctgaaggaagaaatagacagcaatgcaatgacagtaggggacttcaatatcttactatcaacaatggatagatcacccagacagaaaatcaataagggaatattggacttgacatacagtttagaaaaattggacataatagaggtataccacaccttccacccgatattagcagaatgcacattcttctcaagcacacatgaaacattctccaggatagacatgttagccacaaaacaaatgttagcaaatttgttttttaaagaagaaatttaagaagattgaagtcatgtcaagtgtcttttctgaccatattggtatgtaactgaaatcagtaacaagaggaaaaccagaaaattcactgtatcagtcccttttcacactgctataaagatactacctgagactgtgtaatttataaataaagagggtttaactgacttacagttccacatggctggggaggcctcaggaaacttacaacaatagcagaagggaaagcaggcatgtcttacatggtggcaggcaagagcaaaagagcacagagaaaactgccacttataaaaccatcagatctagtgagaacttactgtcatgagaacaacctggaggaaaccacccccatgatcaaatcatcttccatcacttccctcccctgacatgtgggaattataattcagattataattccagataagatttgggtggggacacagccagaccatatcattcacaaatatgtggggattaaacagcatgcttctgaacaaccaatggttcaaagatgaaatagaaaggaaaatttgtagaacttatgagacaaaaaaagatgaaaacacaacataccaaaaacctaggagatgcagcaaaagcagttctgagagggaagtttataacagtaattgtctacattaagaagtaggaacatctaggccaggcgtggtggctcacgcctataatcctaacactttgggaggccgaggtgggcggatcacgaggtgagatcaagaccatcctgaccaacatggtgaaaccctttctctaccaaaaatacaaaacaaaaacttagccaggcgtggtggcacgcgtctgtagtcccagctactcaggaggctgaggcaggagaatcgcttgaacctgggaggcggaagttgcagtgagcgaacatagcgccactgcactgcagcctgggcgacagagcaagaatccatctcaaaagaaaaaaggaaagaaaagtaagatttggaaaaacctaatgttatacctcaaggaactagaagaagaagaacaaactaaacttaaagtaagcatgaaaaagaaaataatagctatcagagcaaaataaaccaaaagaatatagaaatagaaaaatcaataaaactaagagttgatttattgaacaaataaaatatatacataccgttctggactaagccaaaaaaaaaaaaaagggagaagactaaataaatagaatcagaaatgaatgtgaagacattataatagatgccttagaaataaggataattagagacaaatatgagcaattaattatatgccattaaattggataatctgcagaaaaaaataaatttgtataaacatacaacccaccaaaactgaatcaggaaaataatgagagcctaaacagagtaatagcaaataaagagattgatgtggtaattaaaaaccttccaacaaagaaaattcctgaatcagatggcgtaatggctgaattctagcaaacattgaaaaaattaatatcagttcttctcaaactctttcaaaaaatatataacttgagggaatactttcaaactcattttatgaggccagcattatccttatattaaagtcagacaaaagcgctacaagaaaaaaaaagcttacaagtcaatatctctgatgaccacagttgcaaaaatcctcagtaaaatcgtagcaaaccaaattcaacaacatattgaaaagattatacattatgaccaagtgggatttatccctggtatctaagattggtttaacatattcaaatcaatcaatgcgatatctcacattaacagaatggaagacaaaactcataagattattttagtagatgcagaaaaagcattcgacaaagttcgacatcctttcttgataaaaactctcaacaaatactaccaagagcaatcggacaagaaaaagaaatggaagatatccagattggaaaagaagtaaaattattctatctgcagatgacatgatcctatatgttgaaaaacctaaaggacacacacacacacacacacagacacttaaaacagatgaattcagtaaatttacaggatacaaaattgacattcaaaaatgagttacatttctttataccagtaatgatctatcagaaaaacaaataaaaaagataaagataatcccttttactatagaatcaaaaagaataaaatacttagaaataagtttaatcaaaaagatggaaaatctgtacactgaaagctattaaacactaatgaaagaaattaaagacacaaatacatggaaagctatctcatgttcatgggctgaaagaattaattctgttaaaatgtccacattacccaaagaactatagttatcctcaatatccatgggggattggttccaggacaccccgtgtggataacaaaatctctggattctcaagtcccttttataaaatgtagtagtatttcacataacctacacaccttttttaatattttaactcatttctagattccttataatatctaatacaatgtaaatgacatgaaaatagtatagttgttatactgtatttttaaaatgtcttattttttaatgtattttcttctgaatattttttgatctgtggttggttgaatcttcaagtatagaacccatagatacagtgggctgactatatacagattcaatgcaatgcgtatcaaaattccaatggcattcttcacctaaatagaaaaatttgtatggaaccaccaaagaccccaaatagccaaagcaatgttgagaaagaaaaacaaagttggaagcactagattttctgacctgaaattctattaataagctataataaaaagagtatgctacttgtataaaagcccatacacaggccaatggagtagaatagagaacccagaaataaacccaagcatatatggtcaacaaatttttaacaagggcaccaagaagatacaatgaggaaagaacaatattttccacaaatggtgctgggacaactggatattcacgtgtaaaagactgaaattggacacttattttaaaccatacaaaaaaaaaacacactcaaaatggattaaagacttaaacataagactgtaaactgcaaaactccaagaaaaacacataaggaaaaagcttcttgacatctgtcttgtcaataagtttttagatatcacagcaaaagctcaggcaacaaaaacaaaaataaaccagtgggattaagcaaaaacagacaaatgggactacatcaaactaaaaatattctgcacagcaaaggaaataatcaacaaaatgaaaaagcctatagattggggaaaatatttgcaaactgtatatctgatgaagggttaatatgcaaaatctgtaaggagttcacacaactcaatagcaaaaaacaagtaatctaattaaaatttggtaaagtaccccaataggcatttctccaaagaagatgtaaaaatgtccaccaggcatatgaaaaggtgctcaacataactaatcatcggggaaatgtaaatcaaaatcacaatgagatactgtgtcacacctgttacaatggttatatcaagaagacaagagaagtgttgacaagggtgtggaggaaaagggagcttttttatactgttggtgggaaggcaaattggaacagccattatagaagacagagtggagtttcctcaaaaaattagaagtagaactaccctatgacccagcaattcctcttttgggtatacatctaaaaaaattaaaacaatatgttgaagggatacctgcatctccatgtttgttgcagctttattcacaatagataaaatatagaaacaatccaactgtctgtccatagatgaatagataaagaaaatatataggcatatatgtatgtgtgtgtatttcatacatatataaaatacacatatatatgaatattattcaatcttaaagaaggagattcagccaattgtaacagcatggatgaagttggagaatattatgctaagtgaaacaagccagacatagaaagaaaaatagtacatggtttcacttacatctagaatttaaaaagagttgaatacatagaaacagaattgaatagtggttatcagaggctgaaggatggggaaaaaatgaggagatgtcagtcaaagggtttcagtgttgcagtatctcagaatgtaactgtatttggctacaggcctttgaatagatgattaagttaaataaggctgttagggtggtccctaattcaatctgaccagtgcccttgtaataagagggaatttggacacataaagagacaccaggaatgcacaagcacagagtaaagtccatgtaatggcacagtgaaaaggtgaccatctcaagccaaggagagaggactcttttggcctcagaagaaaccaaacttgctaatctcttaatcttggacttctagtctttagggtgatgagaaactatatctctgttgtttaatccaccagtctgtggtattttgttatggcagccatagcaaactattagttagacaagaacactgctaatgtcttttctagacctaaaattctactgttgtttttaaaagattgctgctgttttcttgagagtcaaaagtaaatgcagataattcccattatcctggtgtggtcttaaggaaatttttagtgttctcattatctttcttcctttatttctagatacttactataagttttctagtagcaagattggaatcccatcagttgacagtgtatgagcctaatattatacattgtaaatcattctcactagcattttgtgtatacttattaatatatttgttatttcaattcagaatcattgcttaagttttctgatctttatagtttctctgattatcctctgattgataaagtctttatgattaaactcttcagacattaccattttgtttctacaatgtcgatatcttcatgtttccagtatcttcactatcagatccttgccatatcatccttttcacataattatgataaattataaaaatctcactgtatttggtattattgtaagttaaatgatatgttcaggatttgcaaaggtatattgcacattttcatgatgtcacaaaaaactaatgataaccaggactccttagataaatgattaattctaaaactgaggcagaaaatgtacaagctgagcccggaccattttttagtgcagaaagcaaataaatgcttacaaacaaacaaacaaacccatattgatgtaggtgtgtcgaagggacacaggagtcaactgaaagcgctcccaatggccaaaggtggaataagttgagcaagaaaataaagtagtacaggataaaatttcaaagtataacatccatatccatgagtccatattgatataataatatcaatatcataaatgattgaataaataagtaattaggagagaatggacacatctcccatatagaagaattccaaataatttatgtaaacactccactctcatggagggggtagacataatgacttccctccaacagtgcagtatggaaagtgatggagggaatgagtaactttacggtgaagaagcctgatgaagctaactgagcgtgattatcaatgtcaacattaatagtcataactcatgttgatagtatgtacccttgacacgctgtcacaaaaatagcactttatttctgtaatattcctttcccccaagcccaataacctcagtataatcatgagaagaacatcaaacaaattccagtggagggacatcccacaaaatactttactcctcaaaagtgttcagatcatcaagtaaaaacaaaaactaggaaactgtcacaggcatcaggagcctaaggagacagacataatagctgaatgcaatgtggcatcctgaatgagttcctggaataggaaaaggatattaggtaaaaaccaaggaaatctgaacaaattatggacttcgataaatgaataacaatgcatctgtattggttcattaatcataacaaatgtaccatattacaaacaggaaaaactgagcctggagtacatggaaactctgtgtactattttgcaaaattttctgtaaatctaaacctgttttagaaaataaagtttatttttaaaaaaaatgaaatcagacttcagaacttctcggctattttgagcttagtgctggtaacataaaaaaaggtttaaactatctttaaaacttcgtgagggatgatatgaacatataactaggcatttctactagcttttcaaataaaattaacttagttttggcttacaaaaagattatgatgaagcctactctaatttcccatacatcacaaagctttttccttaaatattaagttttgaagaaatgtaatttagtaggacatttttgtaacttttttttttttttggtatttttagtacacatggggtttcaccgtgttagccaggatggtctcaatctcctgaccttgtgatccacccaccttggcctcccaaagtgctgggattacaggcataagccactgcacccggccatacaaccttttaagtttgaaaattgcctttacaaatgtgtcatagttaccattaattctcacttcgtagatagggtagctagtacacagatgtgcttagtgtccaaagctaataagacagaatcaagacctgatcccaatcatcagactcctagttgaagtttcttttcaccacaccagtggtctccaaacatttttattgcacaaacttatcagtaaaatattgtgagaagcaaccacagtatatgaatatgtgtttataaattatatgcatttatatctaaattattttgggtaaactataaagcatacctcaaagtaagtattaagatgattcaattacaaatttatacaaactgaatttttatttttttcatgcaccagatgtttatttgtgcagccctctttgtaaactactgctccaattatttattgatgtgtaacaaaccatctcaaaacacattattttgtggcaaaaaaagcccacttattattatctctcatgggcctggggttgactgggctcagcagggtggttgttacttagggcctctcatatggttgctgtcagatggtgactggggcctgaatcatttggcttgcttactcacctattacacctgggctggggagacccacataacaaaagaactgagggtcctcgtgtgtttgtgtgtgtgtgtgtgtgtgtgtgtgtgtgtaagtgcatgaatgtatgtatgtgtaagagtgtgtgtgtgtgtgtgtgtgtgtgtgtgtgtattctgtttccctccagcatgatggctttagggtcactggactcagagctccacggcatatgttctggaagaggcagaaccagaacatttatttttctctttttctgacctagactataaatttatgcagcctcactattgattatttaaaagagtcactaagatctgtacatacccaaggcaggggtggacttagactctacttcttgatgaaagcaatgtcaaagaacttgctgacatgtttttaaatcacccaaagcagaaagtctgaactctggtaattttattttatgagataaattcttaataatccattggtgcagagaaagaaataaagtagcaccccatgcttctcacagctgcctttttgtggctattctcataaataattctactgatactctccttttctgtaattgattaaagagatgctcgttcccagataaattaaaactctttccttctcatcaaagcctagagcagctttgctgggactttgctccttcagcctaaagctgtgtccaccctgacaggagatcagtatttttgcaagaaaggctgctaatatagtagggtttttgtttgtttgtttgcttgtttttttttttttttttttttttttttttttttttgtattctgctctttcattgtgctttaatgtaaattactggtatttcactagttgtactgagcacttttttgcctccttggtatcaaacccaatatattagtctttggattacatttgccctctgcaaaaccagtgactaagagctaaagagcagacataggccaagaatggtggctcacgcctataatcctagcactttgggaggctgaggtggggggatcacttgaagtcaggagttcaagaccaggctgaccaacacggtgaaaccctgtctctactaaaaatacaaaaattagctggaaatcacatgaacccacgtggcggaggttaccagtattgcaccactgcactccaacctggctgacagagcaagactccatctaaaaaaaaaaaaaaaaaaaaaaacggagaacgatcagtgccattgccatctgacttataagcataattccatctcaaacagtgctcctcttcaatgaaaacaaactaaatgcaccttgtgccaaagtgtagtgatgtgcccctcttgttagtgtacatgctgaagacagtatctgtttttcccactgtagctctattttttaccctaccttggaattatgctattaacttttctattctctttgattataataggattctgataactttaaaactcaaaatagtctcactttagtaatagattcaacctagtgtattcacatgaactcttattttatatagagcaaaataacttgttcagctctggattgctacagcctggaagccacattatgaatgggatgaaagatttgtctttgtatttttatctctttctctgttttgagctttgctacctcctgcctgaggttatctctggatcttcgagggttggagataatgggaaagaaagcaaggataaatgtttatatatattacacttttcagatttgaggacacgagtgttgttacctttctcctcctactcactttacagttctcattctcaaatctttctgaccgttttcaaactcagaaattccagtatggggaatttgtacattgaagggtttaaggaagcagaacttctaggccatgtggatgtggtgcactctaagtacctgcgggtttagataaacctaagaaggaaagaaagcacagggtacatgagttttgatctctgatacattagagtcttgagaacaagaatgatgaaggatcaagagagccaatggataagactggaggaaaggaagcagtgggcaggaatagtggagcttgagcaggtgggccccgggtgctgaagcctggaaggatgggtgctgcctggacccacaatgttctgtcaatcagcttcagactccctcagtcactgccatagtccagtcagactcctatttgttctctctttcattcaagagaaaagatcatggaatgcaatgagaattcataattgtatttaagtttcatatgatgcctaaaattaattttatgagagacaaaaatattttaaacaattagaaacaaggcttaaatgaaaattcctcaaactcttaaaatgattgaatgtattcacactaaagagtgaatgattaatataaaaatccatctttgaaatgatggcagaaggagagaaagaccactggactcctgatgggtagtagggtgacaatacctaatattcagatttgagatggcacaaagatgtttaaggaaaccaagactttctctctctctttctcttcttttttaaaccacaaacacctttggataagtaaaagctttttcgcagatatatgacattttacatgggccatgtcccaaatgttctgtctcaaagtacacagaaaatgacttaaaaggggcatgggagccagattccctgtggacagtaattctaattctgaagaacacatgcagttgctcaacaacgctgctggattgagaaatgaggtcttgagaattaccaaagaagtgctttcaagataataaagctttgcagtgttccatcgcctgcagaggaacagcaggacagacggtttttccctctaaaagggctaaacttctgaaaccttacaatgatggaactgaagctttggagttgttttaagtaaatacagaaaaaaaaaaaaaaaaaattctgtcacagttcacatcacttcaggattgacattacctgcttttatttattttttacttcgttttggtgatgctggtagaatagatgtcacttgagaggtcaagtcttcaaaacaggaggaaagcagagaggtgaagcaactatgtggaaaattcagggagatttgctgctcatgcgtacattagcctagacatttctttgaagaagctgctaggttaaggaaatgccagtgttaagaaactgcttttgaaataactttttgaaataatgcattgcttacgtgggattctttcacctccagagtttttatgactagtggatcccttattatttgtcattttatgaaagaatttcaataactgcacattagctgtttatctaaacttccaaccttttctttttagcttttggccaggccttttccagtatttacttattttatggaaaaaccaaactttatcactagacacaaaatttaagtgagcgttgtctgtcccttgagctcacccacctttctcatcagccctgctcttggtgatcctcttgcctcagtccgctttggcccctacatcctggcaccagtgtcatcatgggtgctcttctcaaatagctttattgtattctctctctcagtaaagatacaggaaatggtggcattcttttttttttgagatgaagtctggctctgtctcccaggctggagtgcagtggcgcgatctcgctcactgcaagctccgccttccgggttcacgccattctcctgcctcagcctcccgagtagctgggactacaggtgcccgccaccatgcctggccaattttttgtatttttattagagagagggtttcaccgtgttagccaggatggtctggatctcctgacctcgtgatccgcccgccttggcctcccaaagtgctgggattacaggcatgagctaccaccacgcctggtctgttttcacatttacattttaagtgatctgtcatttattacggtacaattgtgaaacaaggatccaactattctttttcatttgacaactaattgtctcagtactatttgttggataaaatattctttccccactgaaatgaaatgccagatttatcatttgtacattctaatatgtacctgcattattttatgagctttatttaggtcaagcgatctatttctctgttgttgtatctgtactatactttatagttaaaacaaagaaatacatttaaattcctggaaggccacaaacctcattattattttcaaaaattttgtagcttttgtgctcactggtcagatttcaaaaggaaaaaaaaagagtcaagcttctacttggaatactttaaaatttatctaataattggaatgtatcttactgggattgtattttcaattgggaaaaggatatgcctcttcctattcctttcttgttaaatttatacctaggtattatcaaattttgttactaatgtgaattagatttttctctcttttttcccttttgtatgttacttttacttatagagaaaaactattgatatttgtaaattttcttatatacagcaactttatagaacttattagctctaaaattattttagttatttattttggattacaagggcatataattacattatctgcaaatgataatagctttatctcttctttttcaaaatatagtcagttagtgaatgcatttccaaaatttgtttcatgagctaaactctatatactattggtgacagtcgtacctgtctggctcctgactttattggaacgcttttagtataccaccttttaatatttccagtttctgataaatatatttttgatgtttcagaaattgtctttattattattattattgttattattttgagatggagtcttgctctgttgcccaggctggagtgcagtggcacaatctcggctcactgcaacctctgcctccagggttcgagcaattctccctgcctcagcctcccgagtagctgagatgacagacacctgtcaccacacctggctaaatttttgtatatttagtagagatgaggttctgccatgttggccagactggtcttgaactcctgacctcaggtgatccacccacctcagcctcccaaattgctgggattacaggtgtgagctaccactcttgggcatcttttttattatattagaaacattttttaaaaatattagaaatatctgacacattttatggagagggagtagtagtaatcctacatcatctgagaaagtacatttggtctgatctggattctttctctgtgtgtcttctatttctcttgtcccatgtggtcatcaatgggatgtatgctatttacttttttattttttattttatgtttatgtctttaaccagagcgcataaagtgtggaatctttctcaactggtttcctttggaagacttgattttgttcaaaatttcaccaaatcctgtctgtggacatgtagtgctttcacgcccttctttcatgtacctttttcccacccagatttatgttctctttggcaacgctgttctctgtggtggcagcaaactcagtgcagtgagggagggggaaattttatatcttctttgttagtaataaatactttctgcctgtagtccaaaataagaataaattacccactgtgcagaaacatggaagtcatgatattctcaataaagcaccattaaacagtcccctggcagtcatggtttggggtgttactgtttacaataccgtgggggttacgtttccattagattttgaataatttagcaataaaatacaaattgtttattccataatgtctaactttattttgcactgtttacactttagcattttactagtgttgagggatggcatccaggatatttgcatctttacttctgacatttatgtaaaaaaagaaagaatggaggagactttgggttatcaagcaagttggcaatgtggatgattatagttatggctctcaagttaattcttaaaaattagacctttccacaatcaaataaaactggataattgacatgtctctgagtattttccgttctaacaatatgtggtaccagtaagaactttaatgcacgatattttatcctttgcttgctatgtaagatgtctctaaatttactatttaccttcctttggccttttaccatgctagttgttttatttttctcataactaagattgcctcattctcacaaacctcctttatttggtaaacttttaaatttggttgccactctctggatttctttccatttcttgatgtactttgatgaagaaaactcaaaacctgaattcttatggcttttaaaatgccaagtagggcaaaaaaaattacctcccttgtttttacatgtgatactgttattaacaactcttcaacttagtgtgtattttttgggcaagaatacttagtgttgactaatcatttctatttccgtttctttccttataatcttgagggcaatgcataaaaaaaacagaaaataaaatttaaagcatgcagcagagatggaggggatcacaggaaggtggtattttggcttttcaaaattagcttaccatctgtgatatttgctaggcaaataaagtttgggtattaaatcaacaatatattgacaattatataaaatctgaatgccaccttgcatctactatactttagtaatgatgtaaatagtatcacattaaacattctttttgccgatgctattataattttacttagttcctgtagttcttcagcttttagttttacacttccaactaatcatctcattttatcattttacttttattctagatacaagtccatacttactgaccgtaagtatgaattcaagggtatttcatagcattttacagattgtaaagagatttcaggtacataatctcacttgatcctacagccttatagcgtggccagaaaataaattcttagctccgctttacagatggaaatggaggctcagacgacttctcaggctgtctaatggattagcaaatgtggctaacacatggatacccattagtagaacctgggccaacaaacagttcttttgacccctggtctttgcttgttccaatacacatcttcacagaaaagtttggttataatttagctctaggtttcatcactgaggtcagactatgccacagcatgttgatggaagtacttaagagtagatggaatgaaaatggaaaacataagaaggaaggaagaaagaaagtaagtcgaggaaggagataaagagagcagagtctcatgcaattgcctgtgggtcagtggtaccactgtcacaggtcaccaatccaaatttaataattaaatataactgagccgtttattatttaatgtgtaaaagatgccagtaggaggatatatgggtatctgttacttgtgtaactaatattcccaattcgtgtgtgtgatttatgtttgttatagtaagaaaattaaccaacaaaatctttaagccctggacctccgaaatcacatgtattcctttctcaggaagaggcagaagagcctcacacactcacctcactgccactgtgagagctgcttcctgtcctgggactagcctgggtgttgttcctcctgaattcaaccaatcctcccacctcagcctcccatagtgttgggattacaggcgtgagccactgcacctagccaacacatatttttgaaacatggtctgtgacagtcacaaagtatgtagaaatgaataggtatttgtttgagggaaggcagatgcttataatatattttgataaagggacatttagttgtataaataagaaatcttgcttgggaggccatcatcgccctaataggaggattactcatttatccacatttggcctctcaacccctttcctattttagaaggtggcgtgagagtccattcttggagtgacagacagccaatggcattaaaggtattaaatactttaccctgttatgttgtggactggcaggggaccactttactagttggtaggaaaacccactagcacaaaaactatttttagtagcaaatgtgcattaaatgctgtcatgcaattagacatccttgcagatcagggacacagttaagtagacagaaaagttagtgggataatattgtggtattgaactacaccagggataatagcattgattcaccccaaaaggatattgtaaataataaccaattaattgttgcagaaattttgaaagtaaatcaatgaaaatcagggagacagattgggcaagtcaatgattttgttcagttttttcgaaaatcctcctgagtcctctgtggtcagggttaatgacatatttgcagttctgcctattagaggccttgagaaattttatcttgttgttgtgacctgagtgcagactcttctgaagtacctatgctttcttctttgctcattactgaaacctgaaaacaacaaggctgacagtagaaaaacacctctagaaacctcaggggaaaaattatccttcagtgtttattttgcctgaggaaacaaccagaagtctctgatgatgaagtgaaggtccatcattttggaaaagtgtccaggaaagatgtgtttttctgtctcctgcattgcagtcttgccattcgccttttccttttctcaaaatgcaaatagcatgcattggcttctctgaccctccgtctttcctgtcattcctacagttatgttgagaaaatgacatctttacacaaggtcaagtatttgccatgttagaaacaatattttttcccaagaattctgttttcaagatacacaggtaagaagttagtttacttaaatccttcaatcaacttttatttatttgaaccataaataatgtacccactttatagaaattttggatgagttacatggaggttagcgtttaatgaaagttttatccttctttactctgtcatctctttgagtccctggtggtgttcaatagcctaagcattcctcctgcttgaggttgtttttaagatatggtaaagttatgaggcagtcattgcaaacagatgaaaaatgacagcagctttaaggacatgtgtgcacctaagggaagattttgaaggtttaaaattagccaaagattactcctcaattttcttcaactcccaaccaatataaagatactcactttctaaatagactagctgaaaataattttaaaatgcttattattgtactaattcataataagaacagcttacgtacactgggtgcttcctgtgtgcatctgatatgcattatcttatttaatgctcaccatgagtgtgtatagtagatcttttaataatcccccactttactggtaaattggctatcccttcacctcacccttacatcatcaccagtcctattgatttgattctatctccagtatacaactcaaacaagccactgagctcaaatccaggggcaatgtgctaatttaagtcactattatctctcacttagcctgctgcaatagcaattttattttccattctgactcccatccaattctcttagtagccagaattaccttttaaaaatgcatattgagtcatgtggctcctccacaaaaaattctggtctgcaaaattctgcaggcattgacccaccatgccctgcctgttctgaccctgctgcttacttctccattcttaccttttacagcctcttcttgctcaccccattccaggctcatggtagtctttcccttctagagcatgcattcttgtcttcacatgtgctgtttgtacccaggctgcctgaagtactcccccagaatttgcctggctactctaagtccttattagttctctgataaaagactgctcctcaacgtttccccaacttagccatctaaacgaggttgatttgctctatgctctcatacagtgttcatatctatatatttgtatctctatgtcataaattctgttgttttatctacacaggcagatttttgtcttgccaattagtatgcaggaagacatttaatgattttttcactgtaagtcaaaaatcctttaagatttcattaataatttttggaggtgctttttaagagttggtgaccaaaagaagccaacgtagcatagtatgctaacattttattctaaaatcctggtttgcagtgttctgtgggagctttttctgaaacctctgcctttccctacccaagtcttaaggccacccataccttgactccaccaccaatcaggatctagccaatacagcaggtgcaggacttcccttccgaaattaccactcccaactccctggggcagtaacacttaacttcctccgtccaaaatgcatagcaattctacctggtccagcttctagctacaaacccacacccattacaacttgatctacacaaaacaatccagccaccaaaaactgtttaaaaagctgtggaatatgtgtaacttaggatctattttctatcagtatatcaaagagatatctgcactcctatgttatgtttatttctgtgatcaattattcaatgaacgtcttctcactagactaaactctataatagcagaaaacattattatcatgtttgtagttatacctcctaaccctagcacagtgcctggatcatgaaaagcaatcagtacacagttctcgaatgaatgcaataacttgcacaaaatcacacagcattaagtgttggacccagaacttaaatccagatatgcatctgattccaaaggccgtgcccgtttaaaaagaataccaaaaagccacagctgacgtaattactatgaaatgtgtatacaaacgcgtatgtggccttacacagattttatttgtgtttgtgaattaaaggtgtgcaaaatgtagttttggagaggctgcatcttggtgacatggcctaaaattcattcatgcctaaaagagcaccggaggccattatgagaacgtgtagatgtatttttgctaaaagtgatctactgatcattgatcatctcaccatcttcctcctcttatcgcataattaaaaactagagaatggaaagaaatctccaggatcataagacaaaataatgcccagtaaagtttctgtttcaaggaattgaatggcactttcctgtcatggcaatagaagatttaaaggcatggatttatgtaaattctttggggagctgtcacatggcccacaaggttcatcttcagtcaggtatcagaaggttctgcaaagaagcatagcagataacatctagcaatacataggagataacatgtagcaatgttctgggctagccagttccccaggaggctccctctgtggtttctgaatggcccatttcattctgcatacaaaaaaagagcagtgttttctttcattaggttttattctcatattatcaatggtaattcaattattcatttatccatatactggtaggtgattcccaacatcatttattaaattgaaagtaacaaaattctaagttatacttgccaccaatccaatttctctttttttgttataaatataatactttagaatatttggaaagtattgaaaaaagtggactgattatttaaaagtctccaaacctatggatatccacaattaatattttgatgtgtgtatggacacatacatctcaatgctcacacacaccattactacatggttaaagaaactgaggctttccctttctatgaaacatagcaggaattctagtataccaagacgaagggtttcacattgcctttcattccatgtcaagtgcaatgcttaatctctacgcagacgtgacctggtcttctcccagtcctcccctggataagtggaattttcattggttggagtggtaccctgacgctaagctgtctctcttcacttagcgattgaggggatgataaaggggttttgcttatagcttagctcttaaggactacaaagctaggctctagtaagggtcaagattgtgagcccatttgtgaaatcaagtcataagtcacttttgccactatttgaagtcacaagattcccccttattcaaaaagatatacgtaatatacagagataacaagaaagatttccaaacaagattctataaacaagataatttaaacaagattcatgaagatgttactcattttcttggtccaggtatacagcttatatttcaaaacaatctataattgctttatcttaccttgcttatggcaaactcctcttttttctatcttgagaaaataaagacaacagaaatgtcctagaactatttatttaatttaattaatcaaatttaactcttataagatacctaaggttacataatatatttgcttagagtgccgtaacaaagtaccacagactgggtggtttaaacggcagaaactcgttttctcacagttctgcaggctaggggttcgagatcaaggtgttggcagagttgattccattcagaggcttctcttcttgtgttgtagatggctgtgttctcacacgatcttccctctgtacatgtttgtatcctaacatcttcttaaaaggacaccattcatattggattagaacccatcctaatgacctcatgttaattcaattattctctttaaaaaccttacctccacataaagttatattctgaggtgcaagaggcaaggacttcaacatatgaatcctggggggagacaattaagtccattgcacgtaggtggtgaattaagggtctgaggtttaaacaatgttttttttctgactcaaagaccagattttttcactggacgaaagctgcctctatgttgttaattctcttctccactgcctatattccatatcattaagcaacttcacctcccaccatcccaaggtggagctagttgctagtaagattttgaagaaattaaagtccttcctctcttcagaaggtggagtagatgaactataaggataagaggtggcaatccgtaagtaaagtgattgaaatgcagattatgaaagttgtatcattattagtctggaaaagagacatttattgaatgaatataaattgtttgccactaactgctagacttattgaattctactcaactagtgagatctagtttaaggggaaaacaatagaaagtccctaggtctatctagtcattgttttatttgttcttcaccataacctgttaggtggataaagttcctttatttttatcattttagagaataaggagtagaagctcagagagtttgtgtaacttgctcaagtagtggaactaggactccaacccatttcttttgattcagagtacagtgatcttttgcctgtacttgctgtctccccattcaatgtacccacaggatgctgtgtgaagttctgtaggtaatttgtagattcaccacgggatgtgctctcaaagaactttctttgtgaaacatcaaactatcatactcctcaccctcctcactctgcccctactgaagcctacaggtgcagaaatggatatgcacatccacactcatgatgtcttatagtcttatatctttctttctttctttcttttttttttttttttggagacagagtttcactcttgttgcccaggctggagtgcaatggtgtgatcttggctcactgcaacctccgcctcttgggtttgagcaattctcctgcctcagcctctcaagtagctgggattacaggcatgcgccaccacgcctggctaattttttgtattttaagtagagatggggtttctccatattggtcaggctggtctcaaactcctgacctcaggtgatctgcctgcctccgcctcccaaagtgctgggattacaggtgtgagccactgcgcctggccatgaagtcttatttcatattatacttttattcatgttctagaagtgggacttactcagaagtgtaagcaactgactgctatggagtatgactggaaagttcacaagctcacatctgccctaaaatatctctccacctatctgccaagatgccatactttctttcaaccaactttaacatcttatctgtaagcatactagaattggaaaaacaaacaaacaacaaaaaaacctggttcaattatttctataacagtgcctttcactagtgagtgtgaaatcagttttgcaggtcaaaaccagcatttcaaatatgaagtagaaaaaataaaatagaaaatatttaagtgaagtgcatgaaattgggggaaatattatttcatgacattttgtttccatttttttctttgtgtatgtgagacctcacatactaaatccttatgaaaaatttatttcttgggagatgacagtgaaaaaaaaggttaagaagtaatcttttttaaaaaataactttatgctttttgatttgaggattgttttgacaatatgataaaagttatggttcttctctcaaaataaaggcacacaaatctacacacctatgttttgggtacaaacgtaaagggctgataaaccatatgactctcatccactgtgctcaagttgaggacatctgctctagctaaaaatggcatgtattctctggaaagggaagaaatggccctggagatctcttctgtgctcttggcctcaacatttaaatattcagcctgaatgcctttagtattttaaagctaacagcatagcctgaagcggatgagatgatgagatgttagcacatttggttaataactttttattaaataaagtaaaactaagtatatggcgatgttcaaaccattccacaccagctccactgaacttacattccaaagaggaagaaaggcaataagcaactaaataataaatgaatgaagtaatttcagatagggttaagtgttatagaggaaataattggaatgatgaaatagagaaaactggagaggaggtgcaataagttaaggaagatacagtagtttattgtgaatgaaggtccagggaatgcctcttttttattagatatgattactgtaccaatatctgtggtcatgcctcctctaccacattacaactatcagtgctttacaatatttcaagaactccatgaatatttgtagattggtgactttatttcagaattgatggagaaaatatcatggctaagagtatagattctagcatcagactgcctaagattggatccttgctttgtcctttactgacaatgtagttggagggaagttacttaatcttgttgactttctatttcttctagtttatctctaaaatgggaaaaatagtattacctacatgataaggaggattaaataggttaagatatgtaaagagcttgtgtattacattttctggttatccactccagaattcagtggcttcaagtaacaggcattttatgatatctcacaattttctgggtcagaaatgtaggcagatctcaaaagggcaattcttctccttcattcttctgtttcatcggttggccattggtggtatttggctggcaaatgagctggttgggaggtccaggtggctttacccacatatctagcatgtgtaggtatgactggaaggctgaaaagattgaccagatgtcctacttgtgacctttccagcagaccttctcaggataatcagatttcttatgcagaagctcaagactctgagacagagtgttttaagaaaagagaaataggtgctgccagatttttaggggccaggtccagaaactaacacagagacagttttgtcctgttcaactcatcaaagccattagagatacaacccagattgagggaggaattctagattccatctctctatgggaaaaatatcaaaaaatgtatagccatctttaacctgccacactatctacagcacttagaaagtactagttaagactctaagctataattattttatcttgtttttacctttcaaaaactctggttatgtttatttcagattgagtagcaaaatcaacctttagccttgatttctctttaccttttccgtccctaatttttaaaatagccctcatcagtaggtgccagttggagatttaaaaacaggcatgccctatacaagccagtgagtattaattgtgagtgtttccctctcatggtagcaacagtttttatttatgtcataagtcacacatatcttggtttcagtatattcattggtagcccataatcccactaatattaccacacagctgtgtgtgtttcttcttcagagaacaagggaacaagacttagcagcaaggtgatatctgagtacattaaaattcatagtgaacaataaaatgtttcttgacccatatacgacttgactgaaccccagtttgttacttttttctccccaatatcaacaaaatcttccaaattaaaacagcagaaacacaaagccacataaaaagttgaacgagttcacattttaaaatttcttgtaaaagactgatgattgtgtgaccttaatctaaacagacatttcctgtaaccgcttatgccccataaggaatctgcagctaatagggcctctgcattcttatctattggcttggctgtctgaatgagtatgtatttgctttgaccatctgctcctatccctcattttttatttaattttttttcagatttaatactgtcctgaggtacacaaatgctctttttggtttgtgaagctcaaggtcaatttaaaggcaagtccctagagaagtgagcatttgtgactaggtcatctatttccctgaatctgttacagcttttgagacgtatgtaagaaggagaaagcagataagccaaattggtttttgagacgaggggcacctacaaatgtagcactattgaccatgaaagtgtagcataatagtatttatttggaaaaagatccatttgatcattttatcctctgggaagctacaatgtctacatctttcttttattaaaaagttcgttagaatgtaacccattccaccctcttcaaccacacccccgcccacgcagccccggttttgtctattaaacaaattctgttttgagatcattttccctaagtttcccagaattactactcccccctctcaaaactgttttaatttgtgtaacaaggctactccagagggatatttgctagcaggagtattgatccagtaatggagttgcagttcaattgcggtgacaagaagcccgatttttttttttttttttttcctttaaggatgatcaagatatttagattccagagggtaaaatttgcacatgaaatcacctgattttcctcgtgacattacgttttactgcttaggcaatacacttgccttagcagtttgttagaagttcacacatttgcaccttttaaatagctttcaaaaagaaggctgtgattctctctcggggagagaaaaattgccctctcacaagtgggaagttgatattccttggagaccaccggtcttctcatgtgtgacattattcccattctcatactgagactcttacagactttatgtgaagcacagtgtggtggaaggaacactaatgaggagccaggaggcctggctttcatactcttctgctcttcatcagctgctgatgctggactaggcacttaacctttctgacggtcctcttcctctgccattttaaaacaagcataagttgctatgtgatcttacgggctcctttccattctaaaagacaaaccaaggtataacaagcttaaaatattaatagctttggtatgagttgaaaatggacagtgtcaaaaaaaaaactttaaatcatttttgttttaatgtattccttaatgctagtgtgagaaactcatttctttcatctgagatttttaaccaaaagctggccctgttgtcctcacttctgatgagacaatctgagaaccttgcatagggtgtggatgtggaacatgttgagctgatgtcagagtttcagtcacctttacacagcagcgtttcccatcagactgatgttcacacttctatttctggcagcaacctgcttggccacagggtttgtacaatttctctttttttctcaacacagcaatttcccagtgcatgtaaactctgtgttaattattttggctattaactaggaaagaagaaaagctcacatttgctaaatccagaatgacggagtggattcagaagtgctctctcaacaaagtggtttacactctggagctaatgcaaactctctttgtttcaatgtattgctcgcaaatattgattaatcatttttctttattagcttatgccctcttggtggtataatgcatttgactttccttctgtcttccaggagagtgggatattataaacctgagctgacacttcagcaaaagggttccagaggtttctagagatggggaaacagatgattaatgtcagtctcctctaataaaaaataaacgttagagagagagggtgtgttttttcttacgtcctttaaaaccttgtgctatgagtatgcgacagtagtgaggcagaagacactatggtgaaatcattcagttcaggaggctcattcttctattaattccacagtgcttcctggacacagttttctgtgccttttaaagaagggccagaggcctattctaaaacctgtatggctgtcaaataaatatcactgtgccggcaaaagagagattctggttgaggcctttccctcttaactacctaaggactgtatatttttaggtacaaaggaaagaattaagctgccttttgtgtcccagttgataagcatagtcttaacagtcagaactctctggctctaagcatgaaaagaaacttttagtttacacataaaaggggtgcttcacacacaggacaaggaaatgggaagttataaggaccccggacattatctccctgtacatctgttttcttctcaagctggtttttatcactcagtcaacaccatggggaagatagccacttcacaggccttgagatctctatcttattttaggaaaacggagcatactaaaccaagggcgtttccctctcagttctaaattcagcaggagaggattttattgtctcagctcatgtcaaacaagtacttttccttgaattaattaggggaagggggtttggtaaagaaacatatatgtggctgccaggaagatcctctcactgcctcttcatcttctctaccactatgaatgaaagaagccagtcaagaatgattacctaaaggacctttgaccactgtcaaagacctgaactttcatagccacacccgaaagtaaaacacaacgtatgttctcaattgatctgccttgtagatgcttgtcaagaggggttttacctttgtgccaatatagaaagtaggacccaaagctgtggacaagacatactcttattaccatttctttgaaatttagacactgttactgactttttactgcagaagagagggattttactccccttcacagccgacatccttaccacaccaacactcatgcctgttcctctctcctattcccacatttatatgcaccactgtcacacagcacatttcctgtttccacaatatcaattttggatagaacaataattcgtgtttatattattattaatatgtaaatgttatttacatagaactatgtaaaatatagcataagccagaattggttaatccatactgtagtaacaatcaacaccagaatttcagtggctttccgtcgtgcaaaatcagctccaggttcaagtgactctccagggcatttgtccttcatgcttgacacagctatccagaatgttctgatcttgtggctgcacccactcaataataatttcaaagggaaaggagagagagaagggagtggaaaatccaggggcttttcattgcttcagaccagaagtgatcatttgttatttttgctcacacttaattgactcaaactagtcacatggctttgtctaattgcatggatattgggatatgaaattttcaggagggaaaactgaatgggatattggtgatgtctattacatgtcagattactttttctcttttttccactttttgttgagtttaaaaattcctgaaggttatacttattttgttattttgtttactcatataaaatatgagtttcatctacttgaccatatctcccctttagcattttgaccagtttcaatctcgactgggttttctccataacagttttggagttgttttcctgggactctttctgcctctcactttgagttgatcccaaatattcctcttttggttttacatcttcactttgatggagcatgtcgtacatgatttcttgagatgggtacattggaggtaaatttttcaataactcatatatctaaaaatgcatttctaaatttcatttttatatctaaaaatttctttattttacatcattttatttttactttgagattgtggctggatataaaaatctagtttgaaaataactttttcacaggattttaaaggcatttttttgttttatctcttgtaaatagtgcttctgtggagaaagagcatttttattctggtattttatgtctttttctttttccttttgaaactcttgtagaatctttgtttctagcattttgaaagtttgcaatgacgcttaatgtgtatccattgcattggccactcaatgggtctttcaaattgaatgactcttcaattcagagaaatttatagaaaacaaatttaacttattttttttctcctgttaaccttttggtatctcctattttgtgaatattgtacctcctatactggtcctataattttcctatcttttctattttatatttagttttaaaatatcttcttttaatgtttttacttaatttttaatttctactttaatattttagatttcaaaagtctctttcttatggtttttttttttttgtcttttttttttttttggtagaagtggcagttcttgttccatggatgaaataacttatctttttttctctgagaatattaataatgcttttcccccatctccttgaatagattcccttttcttcaagtttcatattgctgttggcttattttggttcgtttttcatgttagaaactttcctcagatatcttgtgatttttggatgtatgcttatgtatgaggattgctcactataaagctgactggaatgtttgtatgtatgtgtgtatgtgtgacttattgattataggtttaactgtaaactgttcttattaggtgatctcataggggatcctaaatcaataggtttagatctttttcttgtaaatagctcagattcttcgataaaaattctctcatgcatggatggtataaatctgtctaccagcatccctagagctaggaggaaaaaataggactggggatttcaatataaatgtatagacttttacttagttcccatgttttcagtacagaatacttggttcaaagttctggtattggtatctcttaattctgaatcgctctgcactacattccacattctaaatctctggtattctgccagtgtgaaagtggcacagatctttggctgagcagcatagaaggggaaatcttgaagtcttattgcctctcatacaggctttcaataagtcctcttattcctagttcacattcccttgtacttctacatgttaatggtctcccctagattcatgagatttttgagagtgtatgaagcaaattgaataatttttttttcaaatctacttactgctagcttaggatttagcttcctggggtctccaaattatttcttacttattctgccttcccaaatgttgtgattattgtttttttccctatgctgtttttctaagttggaaaaccccttatattgacacttaaaattgtattatgaaaattttcaagcatgtacaaaatttttaagcatgtaaaaagtacagagataataataataataagcttctatgtactcacttagcttcaacaagcaccaatatattgtcaatgtattaatcaacccctcttctcctcctattccaacttcccactagaatgttttaaaacaaatcctagacacacataatttaatttataggtaatgctcacattaatgtaacaggtaaagacttaaaaaacctaattgtaaaacaacatcagtaattatttaagataacctagtaccaaaatccatttcaattctctctgataatcagaaaaagttgtcttcttacttttctttcttttttaaaaaaattagaatcttcatactgtctggctgatcagcaagcaagcatagttgacccagtcatcaaacatgagaaatatgactgctgtatctccacccatttctgtggaaggttggtggcataggtagacatgaccacatgcccacgaccacttcaggagtcttcgtttaagtcttttacccaagcacatttgttgacagtgtctttagtcatgctcagaagtgttatgatttggacaagaaattatgtagtcactctacgcatatggacaggtcctatcaccaatggagaaagcccataaggaattttaatactttattttctctacaagtcttaggtcttgcaaaggccctactttttaaaatgggctcacaatatccattcctcttcttttacccacttcccatttgaagaggggattgaatagtcaggttactttcctttatagtgtgtagcatgctcttgaggtattgctcaatgtcttcagtccagaacttcagtctgggcatggaattctcattctacaaccctaaacttgaaacattgaccttgggtacaaatgtgagattcactaatttgagggtggagatgattcatagtacagttattatcattctttaattaattacctgaacagctccttgtggcctgttccatctcccagaccctgtgccttttgttctttgtgtgatttggtgcttaaaaaaaaatcatttattttgagctcttctttgtttgtaaaggacttatagttctgcagctatgttagatttcattgtcagtctgttcccacttgcttcatattatcttccaggaattctttgcttttctggtttgtggtggtgtaacacctgactttcaagtgcttttatgagtttactttttatcattttacttactgtgtcattagaaaagggatttgaggaagcagggaaggaagcttaactcaagagtgttcggtaagccatcatgaatgagaacctctatgtgttttttcttattattacagacttcttgaaattttatttcaatttttctccagttttatatatattatttattttatattatatatataaacttgcagagacaatcttccaatagaaaatctactgaatatgacaacagatgtgcatagtcatatgcgatctataactgctaaaatctctcacccaagaaaaaagagatgggcttattctccacgattataaggagaagttctactagaaaattagaattctattcaagaaagatagataaaactgatgtgattcagaaaaatgcaaataaaaatggtaattaattgccactacactctcaccagaatgggtaaatgagagagactgatatcaccaagtgttggcaaggatgaagagtaaccagaatttctttaccagatggtaggagtaaaagctggtaaaaaccattaggaaaactggcattgtctactaaatctgagcacacacaaatccagaaatttaacttctgagtttatatcctatagaaatgcatatataagtgcaccaaaaaacacttaagagaatgttcatagcagtattgtttttcagaagcctgaaactggaaagaaccaaatgtccatcaacagaaaaatgaataagcaaattataaatacccatacattagcatacacagcatattaatactatatagcaataaaaatgacaaactgctgctacatacaacagagctcaatctcacaaaagttatgttgaacaaaataacagacacaaaagtgtacaaaattgtatatattgtatgataccatttagagagtctgagaggaataaaaagtaatctatggcattagatatcaggacagtaattacctttggggagaaggaaggatattgggtgatggaaatgggtacaaagtgagacttcgggtgttggtaatgttctttgttgtgttatcatggaaattttatgagtgtgtttaacttttgataattcatcaaatgatataccaattttgtgcatgtatacaattcttcaattaaaaagctccaaaagaaaccaacctgcttaaaataaataaatgtcattatatctaatataaatgaaccgatccaattccaaaattattacatttctgtattaagcttattaatactctttatttgcatggtagtcaacaattttcagagcattcttaagtaaactatgtcatttagcttcatgccatcataatgaattattatacatttaattttagatttgtttaaaaaactggaataattctttcagagagttgccctgtgacatttgtggcaaataatagagttgagactagaacccaaggctattgagtcttcacatacctttcaccgtacttactgatcctgtaatctcaggatcttgaatagattttttttttcttatgttttattccctcagaatctttctgttagacagcgtatcctaaaaaaccaaactaggcaatttattagtgaatgtatgagtaaatcacattgtaaaataggtgcaaaccaaaaataaaattccaagctccccagccaactgactggaaccccctctcaaccaaggagattccaaagaaacctgagaaactagttcaggccgtgataggaagtgagggtcagacgtgcttcattataccctgtcccttctggagtgttcaggcacaactgaccagcattaacattaaaacagagatattaagactgacagaacagactctttgtagcaagaagatactaaattccaacctgactccaatgtagcattacatgacagatagcagatcctggaggaaatatacatcccaaaatatatttctttgtcatattttggaatggacccacagagctgtctcttgtgagggaaatttgaattctgtaaagactctccttcccttattaggtctttaccagagagtctggcaccttttaaggcccaattagagacattcacgtctattctctctgaagcctgctacctggaggcttcatctacataagaaccttggcttccacaactcccaccacccttaccttaactcaagcagatttaaactctttagacaaagcttaattctttcaaccaactgccaatcagaaaatcttttaatctacctatgacctagaagctcaccctgcacccccttcccaagttgcttcaagatatcccacctttctgggctgaaccaatgtataccttacatgtattgatttatgtctctgcctgtaatttctgtcccattaaaatgtataagatcaagtcgtaatctaatcaccttgggctcatgttctcatggcctcctgaggccgtgtcacgggtcacagtcctcatatttggctcagaataaaccccttcaaatattttacagactttgacatttttcatcaacaggagcttctttaaaaaattctctcacccacaggtaagataggtaccaaggcagcttgatcacagtggtttggaatactttgttttctgactatgttattttcagatatgtggccttcagatcacattatactagtgagtaattatgcttgtatgtagactgaggttggtttgagggaaaacaatcattaacaaaataatgcatttgttacttggaattctagaagttttctgagctcaaagtacagggcaagagaagtggaaagaggtcaaatgtagacatctgaagatatactcatctcgccacaggtatgctgggattttaaagcaccatcctgcagtttacacttaagttcaactacctgataggaggtatatagtaggaagagcatggagaatacatgttctaacttgggatgagattgggaatgttcaggagatggaagaagtgggaggtaaaaatgagaaagcaaggaggccaaatgtacttttaaaagccagagggttgtgctcattcaaacaaccgggcaatcctccattatcaagaatgcaagacccattgtccttttctttctctttcaagttccttgtaacttaagctccaaattttttcttcgtatcttaatttcctctttaagtttttccttgattctcttagtccattgtcttcatgtgaatgatatgtccttgctctggctgtatttgctatacactcttgagagatttctgaatttatcctccatttctaaccttggaaatctacaaagagaggcttaaatacaactaagccatgccatataatgaccaaaacaaacaaacaaacaaacaaacaaacaaagcatggctaggcactggtttgttttgtttatgtttccaaacaattttagattgtttggaaattatggttttataaaaggaaaatgaaccaacaattttacagtgctttctagaatttgtaaacatgaaagacttctcaatggaaatcagtttataactgtaactgcccaacgggttcaccttgcccacggcctagagagagcccatttatcaagacaggggacttgcaattgagaaagagtaattcacgcagaggcggctgtgtgggagactggagttttattattactcaaattggtctccctgaaaagtcggatacggaaggttttaaggataatttggtgagtaggggctcgagaagtggggagtgctgattggttggattggagattaaataattgggggtcaaagtgggttcttgatggcttctgttcctagatgggatctcagaactggttgagccagattacccttctaggtggtgtctgtcatctgctgcattggagtgcagggtctgcaaaagatctcaagcattaatcttaggctttacaatagtgatgttattcccaggagcaatttggggaggttcagactcttgcagctggaggctgtatgacccctaaaccataatttctaatcttgtagctaatgcgttagtcctacaaaggcagactggtccccaggcaagaaggggtcttttcgggaaagggctattatcaaatttgtttcagaatcaaactataaactaaatttctttccaaggttatttaggcctatgcccagaaatgaaaaaggacagattaaaagttaacaggaaaatggagttggttaggtctgacctctttcacggtcgtaatttcctcagttatgatttttgcaaaggcggtttcataacattcaaacttaatgcccatatgcttctgtcagatcaacggtataatcagggaaatagtttactaagaatgcgtgtcactctaaaatggtacctgaaccttttgtcatccacagcataattttaacagctttgataagggacatttttcccaatcaacctttgctactctgaagacatgatacaaatttttgagtaaacaatgtctaaatcaaagtgcaatgtttattctcaaatacatatttaagtcaatgtagtctttttagtttgattagatgtgaatttctcatactttgtgctatattaagaaataaccatctaagtttttctctttttgttcacctaaacattttcttctcctacattaagatacacaaaggcagtgaattataatttgttaatggtgatcataataactcaatacatgagaaattcaaattttttttcatttcaatacaaataagttttcaggacaggcatacagagaaaaacttgagtgcattctgctttgtttggctcatttagaagaaaaactgtagcaggtaaaatcggtggggaaaaattagacaagtttatcttttaaaaattattttcattgtggaataatacatgttcacatataaaagcacagaaaggcctaaacaagaaaagaaatgtctagagaaccattattaatatttttctatttctgtataggttcttccctatatatacatacatatagtgtgtacttgggtgcctgtatttcatatatatgcacacacatagatatacacagaaacacaggatatgtatgtgtgtatatatgcattcctacagctatatattctgttttacaattcttaaaaattaacaataaaagattagtaaattctaatgctacaatatacaatctggaaaaaagaaaaatcaactattcctttactgcacatcttatgttattaagcatttactatatgttgcttctgtactcagtgctgtggtcacaatttctgccctagagagccatcaatttaacagaaagattaaacagacaattttgcaagaatgataaattctgtagtagaagaatgcccaggatgatatgggaacacacagcagggaatttaattcatactggaagtaaccaggatgttttttcagaaaaggttcacatctgagctacgtatttaagggtcagtatgagtttcggtgaaggaggtgggtctagatatggggaggtaggtggcagatcagcttgaaagttacgagagtagagcacattagaaaaagtgaaggcagtctcccatcaccacaggatagggtaacgagagaggtgtggtgaagtgatgaatgataaggctagagaattaagtaggaacagataattaaaaatcagtgtaagtgtttgaatttcattcagaaagtacttgagagctaaggaaacattttaaactgggcagtggtgtaatcagatttgcaatttcgaatgctctactgagcagtctggtgagtgcattggaaaagatgaagtatagagttatggagactagtgagaattgataatgattctgtgaaaggagataaatacatacatatactgaagaagaggcagtggggaggaaggggaaggggtaaacctgacggttaagttttgacagtaatattgctgggactgagtgattgtgtgtgaagtatgaaggagaggaaaaagacaatggtaatatttggatttataatttgaaatctagatggatgattgagcactgtagagaataagattttagaaagaagatgagtttcattttgaacagattgggtttgagattcatgtggaacattcaaaataagtcattaggtagaagggctgagctgaaaatttagagtggcttggatgacagatcagtgtatctcaactttgttatacataataaacagcttttaaaaaattttatcgtctatgctacattccacaccaactaaatcagaatctctaggggcaggaaccaagcattgacatttctttcttttttttgttaacttttattttaagtttaggagtacatgtgtaggatgtacaggtttgttacataggtaagtgtgtgtcacggggtttgttgtaccaattatttcattactcaggtattaagcctagtatgcattaataatttttcctgagcctctcccaccttccaccctccaccctccaacaggcctcagtgtgtgtcattcccctgtatgtgtccatgtgttctcatcatttagctccacttgtaagtgagaatatatggtatttggttttcggttgtgcattagtttgctaaggataatggcttctagctccatccatgtcctggcaaaggacatgatcttgttttttttatggctgtgtagtattacatgatatatatgtaccacatattctttatccaatctattattggtgggcatttggattgattccaagcctttgctattgtgaatagttctgcagtgaacatacgggtacatgtatctttataatagaatgatttattttccttttggtgtatacccagtaatgggattcctgggtcaaatggtatttctgactttaggtctttgaggaatcatcactgcactgtcttccacaatggttgaattaatttaatttacactcccattaacagtgtataagcattcctttttctgcacaacctctccaccatctgttattttttgaattttgataatagccattctgattggtgtgagatggtatctcattgtggttttgattttcatttctgtaatgatcagtgatgctgggcttttcttcatatgcttgttggccacatgtatgtcttcttttaaaaagtgtctgttcatgtcctttgccactttttaatggagtttttttttttcttatacatttggttaagttcctcatagaacgcactgacatttcaaaaactccttggatggttccagtgggcatcccaagatttagaatcactctcccaaagagatgacatagaccagtggatctcaatgttgattccacagtagaatcatttgaagtgctttaaaaattctcaagatgcaggtcatgtcgtgcaagcattaaatgggagtataaggagacagagcccagatagtaatatttttgataccagctttattgaggtataatttgcataatatataattcatccttttgaggtgtacaatttgatgttttttagtatactaagtttatatggacaattcatatcagtggtgttatacgatatatgttctcaaatgtggctttaatgttgaattgaaataggaataacaaacatccttgtcttgtttctgatcttagaggagaagtattcattttttaatgattaattacaatgttagctctgggtgttgttagtttgttgctatggatgcttgtttgtttattgagtttcctgaattaattgtgaagagtctgattttctgtcatgcatacccctcaatatctctgatcagttagcttagcggtcagctaatgacttcacatagatttctttgaatgcattaaactagtaagttgctgtcattttgctgaagggctttgggcgcgtgtgtttgaggggaatatttcaacactccagcaggcagtttgaaaactcttctttagccttcgtttcctgcttgtgcaaagcctcagacttatccacaggtgagagattaaggccttcccaggtcttttctgcgcttgtgcacatccctgcaagtgcatatgatcttctagagttccaggaatatgttagatattttcaacactccatgtgaaaatctcatcccctggttttttcttttaaagtttttggtctgttacttaacccaacttgtgtcactgcctcagctgcacaattgaataattgccactgattgattttaacaaattccttaaggacagggctgttcataccaaacgagctgctgcctcaaatttgagtcaactgtcagtcacatcagataaaaacaagccctgagaatgaaagtgctagtgaggtgaatagtgacagttctctagggataggattttccaggaactccaaacccattcactccctcccagtggctcctaggcttctggagtttacagtttgtgtagcttttggttggaaggctaccatggacatagggagggggaatagggcagatttaaatgccacaaagcttgctgtttttaccaagggccagttgatcttctggaataaatgttcctcaaattctcgcaagcctttgcttaattgctagagttctggcaaaattaatttttttcctttttcagtagtattcgctgtctttttttttttttaatggaggagaggatttatggaggtctgcactttgccattcaaaagggtttcctattataatttgtataccaccttatagatacccatgttcaggaaaagttgaaaaacactggtttttacagaaaagaagatcaagggccagattctagaaaacacaaacatttaagaccaggaagaggaggaggagcaagagcttataaataaggcagataaggaatggttctgaaatgaatgggcttataaaaagtaaaagagaaaagagttttaggaatagaataattaaagctattgaatgctgcctacacagattagaaagttgattgaaaaatactgatttgaattatctacaaaaaagtcactgagatttttttttagaacaacttcagtggagtgatggggcagaatcctgactacagttaagttgttacataaataggaggttaaaaaagagaaaataattataggtaactcggaaggagccggactgagaaaggaaggggagagaatataggctggaacaagacatgaagtaaagaaagttgcattctcccagggctcagtttaactgctctatttattattcataaattttctttttggtatctgttctagaccatagggctaccactagtcatttggacttgtgggtgaggagagtgacctttctcccattatgtaatgaagaaatgtaatcctaaatattagtcatggctctaaacagattctcaatgaaatggtggcgacaaataataactggacctatgaggggcagtagactgaagcatgcatgaagtctgagaaaactgagattaaatccctgcttcaccaccctgctggtgctagctgtatgaccttgacctaaaattacttaggctctcttgactttgctttcctcatgtgaataataacactaatcattcaagattgtcatgtgggttaattgagataatgcccagtcttggcaataaagagaactcctagttctgcctcttggatgctgtgttagaatggaagagttagctttttaatatctccattttctcatctgtaaaataaaaaagttgggttatataatcttcatgcttcttttcaactttaactatatgagcttccaatttcttttagttcagagctattcttcatgtactttgtgggctagatagatatttcgagttggcctaggacttaaaccattctgtagatgacagtttccactggaaaaggcattccaaagaattgacttacaaactgtggaagacagctctgccaagctgggtagtagttttaaatagatgggcttaacctaggatatataatagaaagggctcaccaatgcatagttcaaatcctttagaaatgagctttgaagagaggggcaagtggcataatatcagatttcaaagttaattctctgttttgggggctcctggattgatcattataaccgaaatctttctttgtttatgaatgtttataaatgctagcttttggcagttgaggagactttgaagcagcaaactgcacaaggaagaaggacaagtttgaagccagatagggttcagtaggggtaaagcagagaaaaagagtaaatcgttggatgcaggatgattagtaagaccagcaagtgatatgagtaccgaattggataagggactcagagactcaggaaaagggagaactggaggcccggtaaggctgagatgggccagaacaggaagaacaaaccaaaaggatttgccttctcagagactgatttatttttcccaccaatgatttcagcttgttttgttgaagtcaccgatgcattgtggtagaattttatctgagtaggtagtatgtaatttaacctcccgtttcagggcaattaaagacgtgctcattttcttttagcagattagtgctttaaaggttaaggaaaattaacttagagatttaaaaggagataaaataattaggaaataaaaacattgaaaaacaatactacattcactgtgattttattaaaaatcagtttttacacaacttttaacacatggtatcctatcgtttctgtctaaattgtaaaactatgtctgctttgacatttttttctccccctgcttatttccttcaggtggcctgtcacatacatttatgtttaaaattaaagatggccaattttcctttaaggctgttccaattccacaccacttctcgaaataactggagctgtccaggatgggctgggaatatcccatctacgttgtctgccttactggaggcttcgcattctctcagagacactttgctcatgtacaccatttggcaagaaagagtcattggcatgtccttggatgaccccttgtctaagtggactttttggatggtactgttgatcaatgggggctttgtaagcgggcaggccccactgctgccctgaagatctcttctgcaccctgcaaatgacactaacattatgaaaaatttctccaaagacagatattttcaattagccaaattactctaacagtaatttaaatcaggaagatttaaggcagagctagttcctatgccagccaagaagactgctctgccagttgaaaggcaagcacatccttccctgccaacttgcaatgagatggttcttgcagtgacagcagatctaccatgcacgtttgatttaaatccctccattaccatacctttgtaattatcatcaggcaatgatgagtcctggggaaagtatggatcttaaattcgaggatccagaagcctaatcgaaatgcagcacatgaaatgaatctttcttcttggtatatctcctcttttcaaccaattggtcttgatttaagtaaaattgtagcaaaaccctgtgccaatattgtgattctttttcactttgctaatcaaaatgttgtttcgcaaggctctgatggtgttcaagacaccttataggaggtatggtttttctttaagttggctggcatagatcctttatttcacatgaagtcatgagaacgatttgtaaagattcctttgactggtaaattcgcttattctgggatagtgctctcacaatgattctatgaggcaaatattatattggtgattttttttgtttgctgttccttaaggttaatgatatgtagactactctaaatctacctttttcctacctagggactgtatgttatttagaaaacataaatttcagaggatttgtaaggatgagcgaggttgctttttctttataagatctaacttcaattagcaacattttgttaaatatctaactttgcccattgcccagtgctttacttatagttaagcaacatggtgtgaagaaagaggcataggcttaattccagatctcagtacaaatctgaattcttcttacttgtaaattggtgtgaccatggatagatatctttacccctctaccatcccaaatctctcctacaatatggtggtattgaaactgaccctctctagttcctctccatctttgacacctatgattctatgaatatgggaattctcctcttgaagaattaaccatcagcccccatgtttagtacttactatataattttgtttaaacagttatttatgacattctcgcaatgcaaatttaggaacccttttcttccaggacttctcttccacctgtcttttattatttcagataatggaaatttgaaaccaaaaagagatatatcagcattattcttatattcatagactcagggttagaatggaattggctccttttggtttggggaatagtatccttcactgggacacctttatctaataggctcatttagcctttaacacttgcccactttgtattactatattaaatacagagtgctgccttaccagccagatgataagttcttgtaggtctggggtcatgcttttgggctccaaatatctctagcacctagtatgtaacagctagcccacagctaatcacttaataagttgtacaccatgatttttttttctaagaaaaaccttatggaagaatagtactaaagatttccttttaatcactgaaatgcaaacaattttccacaacatccaatgaaaacagaatgtataaatgaatcatttggtgtactgtaattaacagaagtccaatttggtgtaattagtgtcaatttatttttaattgacaattcctcttatacatcatatagtatatagctaagtatttctacttcacaaatagcttacctagtacataattttatgctaagtatctgtgtagtctttctcctcttaaaacaatacgataaaaaaatagaaaacacacacacgcacatacaactgtatactttgaaaaccagaatatctcagtttagaaggcaaatatcccagtctcatgactttagggatgtctcccttcactgggctcttcagctatgatttggctctattggttcggtactgtgatgcatatgttgtgatgggattgggttgctatcatagtctttgatattggtactgcttcttcagctagattgcaaattcattgacagaaaagactatgtattttatgtttctttgttccaagtgtctaatagagttttatttatttagaaagttctcaattagtagttgctgcaatcatgcaggtagggcaatagacacattgctcattgaaagctcgcaataaaatcaacaaatataaatctatttattaagcttcctaatttacaaacaaagcagaaatagctatttttatactaattaaactactgtaaattttgtatcctgtttgtcttatgtgaagaggtatattttgatcttttaggtgttgccatagagtttaatctgaaatcttacgtggcataggatatttcaagagttaaaatgcttttaattcagctaaaataacaaatgtattagataattacatttctctatatcaacactgctgcacacattaaaatgggaggcagctttgaaattattgaagaaaagatagatttttattatagtaatttatatgatgtctaattcatgtctcagaaatgcacttataaataatccttaaattacatctttcacttatatttgaagaatttttggcttttttcagaggaaaactatcctacacctcttacagcacagtaaataaaacatttataaaggtaggtagtaaaaaagggacagtctagaaaaatctatataaatcaggatcctgagagttctttttaagattgaggatgagaagtaatttttctcattaaagtcccttgtgtgaataaaatagttcaatattttataaatatttaataaattattatttcctacaacttatgagtgtttggacaattgaagctatgtttggaatatgagtatatgtctgtctatgtggggaagagatgatgataaatgcctgacactatgtgtcttgaaaaagactaggcaaaagaatttctaagttttacagaaggcagaaaggatgcttagtgggattctttatggtacaaatttgaaagtgcctgatggaagtgcttcttcatgcttaaatcttaaaagtattaataataatattatatgatacaaataatgagctgggcagaggtaaaatcttgcagaaatcatactagatgctttacttgtttaagtttcccaacaacactgcaatgtggacattaacctcccctttacatttgaataaactggatcttagatgcttaagaacctgaagcaaataagtgttgaaactaagcatgatcccaaatccctcacacgccaaactttacgttcttgtattgcatcatgttgatttcctgtgctgaggaaaaagttatttttccttttactatctataatataagtagttatttgcatactggttctggcactgtcttacacaggacgttccaataactgccagtcacatagcgacgattatgcttgattaagcagatccagtaagtacttgatcgactttttcccataaatgctgacattctgcagccaaagggagaataacacttgccattattctgagcactctgtgcatctcccctcgtccctcccaataatacctggccctgaatttcctaagatcaatgttcccagattattagactcagcccagattccagggtttccatcaaattcttcctgggtaatttgagattttgagttctataagtactacaggcagacaggtgacaatttgtgagatttgagggtatgttcagcaggtatcattgttgctattggtcattctatcccagataattcattgttagcaatgttgaagtcctcacagtgctccagaatcctctagaaatacataggaaagagtgctttcaaaattgttaatgcatactattataagaatataaatatccccacaagataacctgatagctattggctagcacattgttttatagtctgctgattggatgacttcagccgtttctcaaaaggtggcccaaggttcctgtgtatcagaattgcttgacaattttgatacccctctgggccctatccccctgcctcagattatcataccctctaacttagagtattagaggaatataagtagcttaatgtaataaagtttaattttatgtagcactcaaatgggggtcaagcaacattcccgaatgctttcctctaaaaatgacccagggatttgagctcttcctttggtgggctccccgtttcagtgttccttgcttgcagccatatagatgaagagatgaaggtagccaaagaaagagtaaggaaaacctaatgagaggaggacatgaatctcaaagcagatattatgagtcaggccctaccattgacgtgaactgattacaaggacccagctgaatgcaagagggctgggaatatacccaagaggctaataaacatggtttggggaacacatagcattttctctgcttcgtaagttatgtgagtaaggctgattagaatggagaaaagcaaagtcaagtaagcatgccacgttttgattgaaatggaattttaatgggtacccaacaatgcctttatagttaatataagcctgtgtaaagaagatgtgatcataatgtgacttttaggcaggttgttttcatttccatacatctgcattatggtctttgggaaaattcacatgggaactgttgataaggaatatctgaaatcagggccagcttcatgtaacctgtgttgttgcacagggctgtgctctcacaaaggtccacatttggcttaatgctctgctattgtattgctgtcttaaaattcttaatcattttgaacaagaggttgtgcattttcattttgcactggatcctttttctaagcactcaggctgtctcccattacatagctggtcctacctgaaacttgtgccttatcagtgattaaaattaaggcttcaaggataaaatgaagacatagtctttaagatgcagtcaatgctaattgatcttttagagaagacaagttacaataataaagttccaagggtgggggtgtgggctcacacaggtgcatgtgaacatgggcctgtgcaaagtttattaggagcaatttgttttaattgatattcattgggcatcattccactgtttattcttacctactcatgtgaagagttggttgatgtcaattgcacaaacatttgtttcagagaaatgggtgtttcagttggataaattttaattaagtaacctttactgtacaagtagttgcttttgaagccaggagaaaaatgactataatttattaattctataatccagaatctgaagatattgaatcttgtctactctaaccttgaatataattttcactatgaatgtcctaaatatctggccacaagaataaggaatacaaaacatttccaatgtattgttaaattcttctcctattgcaaatgcctaggcatttaattattaattaaataatttaatttatttattattataaatttattaatataaattaaataataatttaattattctcaagctcatatatacaggacttgattgctgatgctggtaagcaaagtagccaaaagtcttgaatttccagatcatttggttctgaaataatttatttgtgattgctgcttccacaccacttgtatacattactactgtagtatatcacatttcatagggatgtatttatttatacatatgccaaaggaccacactgaactcttaattccttgagaacaggtgctgtatcttatttttcccaaagcttagcagatttaccaggtacctagaacatattcaatgaagagttgatgagggagtggagaaacaaattatgatataaaaaatcacttttctttcaggaagtagcaaagtgtagatttacaggtcttcaaagaaccttctgcttttactaaagccaaaatcacagtgtttttgctttgcaagaatattttaaacttgtataatgctctttagcccataacagctatgttacacagaaatttaaaacatctgagggataaaaatagcatatacttaactgttatattcataaattcattttattgaaggacttttctgtcctgttcaaaaaaaagttgttgattgaacacacacaacacatatacaagaaaaaaagaacaggtcaggtgtggtggctcacgcctgtaatcccagcactttgagaggacaagacgggtggatcacctgaggtcgggagttcgagaccagcctgaccaacatggagaaaccccatctctactaaaaatacaaaattagccaggtatggtggcgcatgcctgtaatcccatctactcggggggctgaggcagtagaatcgcttgaacctgggaggcggaggttgtgttaggccgagatcatgctattgccattgcactccagcttgggcaacaagagcgaaactccgtcaaaaaagaaagaaggaaagaaagaaagaaagaaagaaagaaagaaagaaagaaagaaagaaagaaagaaagaaagaaagaaagaaagaaaaggaaggaaggaaggaaggaaggaaggaaggagggaaggaaaggaaggaaggaaggaaggaagaaagaaagaaggaaaggaagaaagaaggaaaggaaggaaggaaggaagaaagaaagaaggaaaggaagaaagaaggaaaggaaggaaggaagcaaggaagagagaaagaaagagagagagagaaagaaagaaagaaagaaagaaagaaagaaagaaagaaagagaaagaaagaaagaaagaaacaatacacataagttttaagggatatggatgtttatatctgtttgtattaaacttactgctaataatctactttttcctatggtctactaataaatgccaagaatagggggaacgatcctcttatttaatgctggagatagtttatttgctgtctcagtttcctgtggttgttacagcaaattcaccaccaacttggtgctataaaccaacagaaattaattctctcttggttttggaggtcagtcagaaatcggttatcaatggactaacatcaaggtgtgtctgcagagccacactttctctagaggtgctaggggagaatccattccttgcctcttccagcttctggtggcttccagctttccctgcttatggttactttactccaatgatcaaggccagcatcttcaaatctccttttgctctgtcttcacatggtcttttcttttccatgggttaaatcttcctctgcctttctcttataaggacatttgtggtggcatttagggacccactcactccttactttaaaatccttaatttagtcacatctgcaaagaccatttccccaaatagggtgacatttacgaggttccattgattccaatctgctgtctttggggggcaatgattcagcctcctacacttgctctgcccactattttcattaatgactaagtaatgggattctagatgatgtaccctagtgtacttttctccacactccctgacacaggaataatgatactgtgtaatacttgagtgttggaaaactatcaactaaataacactatcaagaaaacactgcctaaagaagcaggctttggcaagtagggctcagagagggagctcataactgcatgataatacttcccataaattatagtaatgttaattgtctccctcaaagcaaggccattaagccgcttactgcttctaccttaataatttattttgatatttcttgtggccctaccttttcaacggtcttttactttttacccagaggggatgtaaacacctccctgacagtcctttgttgtatatttcatctctaagtataacaggagagggaagcaaatgaccaaataggtcgtgataagctctgcagccaaccaagacaaaaggctctagaagactacagtaggaagagcttcattcggaaatacaaatcctaacacatggaaaaaagtaagtagatctacatgccctatctaaacaactgaactgtcagtgactttgtcactaaccaggaagagattttctgttttatttatttccactgtgctgaggtaagaccatcctcaacatgaaagaaggcgtttcattccttcaacacatttctatgaatctcctactatatgccagatatattatgtaccaagcactgattaatttagctgctttctttcaccctctctgactatagtttttcatgtaatttgcagggtcaaaactttgcaaagtcctatgcttggccatttaaatctgagccaaggtcacataaggacaatttagttagagtgggagagaaaggaaaaaacaagaaagctaaaaagttacataaatgtcctctagcaagcaggttccttgttctgagggctaatgtactgtagcaattcatcagtcattctaatagtcttttaacttctgtcagaaagtctactgaatgctaacattttaaatgtttaatattctaaaacatattttcattaatcatgcaaattatctggacatccgtattttacaacaacctcttttgagactaagaggcctaagagtttgtgtatgagagcctgatgttagcaagtgatactgtagatgaagtataacttagaatcaaagaattttagatgtgaaaaactgctaatgtaatttcagtatctatgtgttatcatatttatacacaccctccaaaatgctattaatgtcagatatttctaattaggtagcaagcagcctaaaatatgcacttccttcattctgctttatcatatggttgctggatgcatattaatattgttgggtggtacattttcccaatagaattgaccctgtgtttcatagtaaagtggacactggattttgttattagtaaaggagaaaagaagtgttaattgcagttaggttggcctgaactgcagcatgaaaacctccatttatatgctgccagtcactccaattccagaatttcttagcttcttggaaaaaggagaagtatatgtctgggccccatgaaacaggtggattaagaattgaaagggtacaagacatgaattttgatggagttagtggaaattctttacccttttttcttttctttctcctctcctctcctctcctcttcttttcttttctttcttttcctgaagcaaactgattgccagcaaggctggtggctggtagtgaaatagaaaaaaatgacctgagaccatgtaagtgtagttataccggagccatagagctcactgctttcaagaacatggcctaagtaatttgaagccatggccgggcgcggtggctcacgcctgtaatcccagcactttgggaggccgaggcagggggatcacaaggtcaggagttcaagaccagcctgaccaacatggtgaaaccatgtctctacttaaaaaaaaatacaaaaattggccaggcttggtggtgcacacctgtaatcccagctactcaagaggctgaggcaggagaatctcttgaaccagggaggctgggcaacagagtaagactccgtctcaaaaaaaaaaagaagtcatgaggtcatgagcattggtggatcactgtacttgcccagctaccagcaggaaacacaatcaaattaggaaatcccaggaaggcttatttataaagggactaattacaaaggtgtgggcagagtagagggcaggggaaccaataagggctgcactggtagtgggagctaagagctacagagctgttactcaatctagaccctaagagatcaggaggaagagcaattactagaatctcaaggaaggagaatcatgtaaaaggtcaccttgaaaggactagcaacctttgattaagggaagcaccagcacaaggtgatctcacagggaaaacaaataccctgacctcactcctcagggaatgaggggactttctgctcactgagcccaacaggaacctcagggcacagaactggaatgtagtagcttatacaggtgaatatatctgagtgaatatccaggcttcacaagtggagagtagattggagaggagagtcagaaacatctcattttggtatgaatgctacttctttcattgtacgctaccaaaactcacagccacccttccagtgattttatacagtttcaccatgttggccaggctggtctcgaactcctgagctcaggtgatctgccggccttggcctcccaaagtgctgggattacaggaatgagccaccatgcccggctgtatatatatatatttaccatttcctatcttttcttttctttgtctaaactaaatttctagcagcattgctgtatcttcagtacaccagcatgaaccaccttagcccctgagtaatcagatatttttttaaaacatacaaatgtgatccagacagttcattattctccctatatcactatttcagtgtaacagtgtgcttttaaacgtctgtagtttgtattgctaaaggaacacttaagacctcacttttttacattgtttgccttctaattatatttttctagtaaaatatttaaccattacttcctgaatcacggattctaaggtgcaataaaaatccaaagggaaatatatttgtttcctacagagacagttttttttttttcccagagcattttcaatgactgctgcagaaacgaatgagtaaaggtttccgaaatgaatagttgcagaaaaccaacttactgtcatacagaagtccatgcagcccccgggtaaaagtacttatgtatctccttttgttgagttctctatttttttttatgaatatgcatattgggggataaacttccatctgctctcttttagctgattctatcacatttttgagctttgcatcattatggagcttcagagaaagatgatcatttacattacatatggatataaaggagagaaggagttgatgaattgcaaacaagtataatttatatggacaaagtgtgccagaagtgcttttcaccccattttactcggcaactggaatgattcctgcccattcacttggcctagtgcccaagaactcagaaaggaaatgatcctgttagccttacacatcaggattctactcctgccctatgaggaaatgctgctttgcactcaggcccatcagggaccccagaaggtcaaaagaaaccactgaatatactaatgtcatttttttactttcttccctcatggtttcttaacttataatttatgtcacacagaccttctgatactctaactgttggtaattcaaatgtgagaagtttgcatgacgaagatagggaaggaagagttatgaaaaggtcatatatgttcctggtagcttctcagcctctttctgcacttcgatttcccatggcagattatttgcctaaatgctcttaagctttataaataggtaaatatctacatttaggcggccttcctgagggcttctctgttgcctatagcacaatgagttgtgactccataatttatcagagaccagggtccaaggtgcactaatagcagtaataaccccaaaacttttattttttcacttattcattaggcatttatttataaatccttcattcttcaaaaatgagtactccggctgggcacagtggctcatgcctgtaatcccagcactttgggaggccaaggcgggcagattccctgagctcaggagttcaaaaccaccctgggcaacatggtgaaacccagtctctactaaaatacaaaaagttagccaagcatggtgctgcccacctgtaatcccagctacttgggagcctgaggtgggagaatcacttgagcccaggaggcagaggttgcagtgagccaagatcctgccactgcactccagtttgggtgacagagtgagactccatctcaaaaaaaaaaaaaaaaaaaaaaaaaaagagtactcctatcatgagctaggtgtgaggaatgaaagctaaatatagcacagcctctccgtaagctggttaggagtaaacaaagatattctttcatgaagaaatggtcattcatctgagaagtcctcttaagccagctgactctctctcattgcttctgacaaacacagttgtcatagctctgagacaatttgtgtcttaagaatttcaaatgcctgcaagtccatgcctgcattgtggcagcatgtgcactgcttccactgaatgtccagacatcaatgaataaaaatgaagtagtggatataatagcagtagttgtttttatgcacatactacatgcgtcgtgctgtgtgctttacacacattatctcatttaattgacaacattttgtagattaaaaaaaaaagactaagcttagaggataaatgacctgcccagtcacacaattctcaaaccagatgcttcaactccatgatctcctccagtctctatgtttaggtgaacattgggtgtgatcagagaaattcggcagttaaataggaggtaacataaaaagagggttgcttttatctcatttccatagccaaaaaacctggtcaagtttagaagctgctgttcttttacctacatttagtccctattcgttttgctctcaacctttacgtgattgtagcgtgacttcccactttatgaaagagtacttgaagtctgtatgcaaattattcaagttttttgatggttgtggggaggatggaagtgcgtgcgtgtgtgaggtgatggagtatctaaaatttcttcctattatttttctcagaacttctgcttgtaacggaagtttctcaacatgaaatgtcatcaatttggcctcattcaggaagttgcagggcacttgactgtaacctcagtaaattgtacgttttctgaaatcctgataatctttagctgcctatcattttgaaattttaaaagttattttatttctgaactaactcccttggcaatttaattgattaaaagagaaaagattataatgaaatacttcagaatgtagatatattcatctgtacattacaaggggaactcagaatttaaatgatctgatttttgtattcatcaaaaaattactatgaggattttatttatttatctggaataaaattcctctaaccatgcatattgtcacaacatacttgaatttacaaagatacggaatctctgggatcagaataacggtatattctgatctgtgtatatatgaaagactcagtgggttccaatgagagaagctatgctatgattctcatgcggttatatagttaaaaagacctttgttggcatagtcttggacagcatacatgttccaactttaaatattgctgagtgaataaataaacatatgagactgggaaatgtcgtcagggttcaacctagaaacacaaagccagtatcatgatcttgtaattattataatgttaatcctttagccatcttaaaaggcttggactcatgtctctcactcagccaaaagcagcagaaggtccaagttcctcagctacctcccaaccttggatgagccgtttcttatctttccgctgctctttattcagctttccatggccaagagaaaaacctgtcttccttctgttgatgttccctgccccacgttgagggagctgaggcgagagctgcagaggatccgtaaggagctgtgggtaaggtgaggacagcagccctcccttaatgtggagtatacgtccgctattcttgtgtcctttttagtgcggaactccgtgatgaggccttcctcctgaccacttgagcctcatggtgtctcctctttttaggaatccaatctctcttcctgtgcttcaatctcctcaagggctctgcagcacttcccctcaaaagcatttccctaaatccttgactgggtaccagaccttcatttttaagtgattgaagttgtggctgagtatgcgtcatgggcgattgccaccgttttaaagtcaagtagtttgttagttgctccccaacttacaatttcctggcatctccataaagaagctatcctgtcttgatctccctgaggcagcaggtgattaaagttttaaaatcatggttagtgactgctgtgtttaaggaggccccagaataatcgatttggagtggtagctgtagcaagagtggggtcatgatggaggcagcaccttggaaaactgaaatgaaacaccatttcatgctgtgaagggggaagaatagaggtagacatgtgctttagcctcacctgggcactgcatatgcggttaaatctcaggggtctggaaaaatatgccggacgttagcagtgtaatgttgtcctccagcatttgaaataacactttgtgtttcctgttttttcctaaggtattacgttttattggttaaaaaaaaaataggtcactttggaaggtacttacctacagtacctatataaattgaatggatcaatttaaataggaagatggaatctgttatataggaataatcatcatattcaatgccctctagcaaatatttcctaagtgcccactgtgtgccaggtattatgttaggcaccagagattaaaaaggctaaacaaaataatctctgtcacaaggaggtcacagtcttacggaagggcaattgtcatacaaatatataaagcataatatgacaagtgctatgaaccacaatttacaagttgctatggaaacacaaagaagagagcaccaaagggaatcatggaaggcttcacagagtaagtgacctttaggatggaggaaagagggagacttcctaatgtggaaaatagcaggagacactccaggaaaataaatagcatatggaaagtcacaaagggaagaaaattgcaagtatattgttatggctggagtgtagattgagaggtgtgtgtgtatggtggtggtggtgagggggtagttacaattcataaggtaggtaaaaagcaattggggaagaccttatgcagcctggaaggaagtttggatattatactaaagacaatgagaagccctccaaaactttcaagcagaaaagtacctgatttgattcatggattagaaagatttatctggaggctgtgtggaggatggatgagaaggtagggggtcagttggaaagctactgccattttccgtgcatgagatcatgaggatccaaagcaagacaacaaccatggaaatggatagaaggccatgaatatgaaagcatttgtagaggtaggatccatagggcttgattacttattgaatttgtatgaggaggatatatgtgagatgaagcaagaagtgattttctgctttgatgactggctgggtgatagtagcagtaaagaggagttggcaataaaaaagcagaaacaaatttgtagagaaaatcgatggtttggttatgttgaattgaagtttcctgagggtatcaagtgagtcagataaacatcactggggttcaggggacagatgagtttgaggaggttgagattattgctatgggatgcacttatattacaaaaagtgaggggtgtctgggaggagatattttctctaaagtccaatattaaaacccttaagtaacattactctggaaaatgcaatatgcaaatagttctttttattattaacattagggtatgtcaaattttaaaatatttacacttaaagacaaaacatttccacaattattacaattggtttcactaaatcagaagtgactacacattatctctacttttataccagaaaacaaaatgaagaaatcaacaaaatataattactaaaactccactgtggatcaggataaaatgtgtccaatattaactcacactttcccaataagtataaaaatgaatataacattgcttggacaacttgtttcaacagcgaatcctctattactatttgttcaataacatatataaattcaaaactggcaggtatgaaaaaaggttactttgttttttgcagatactgtacttgtaaaataaagccaaataaagcatatgtcacacataccaaagtcttacattttgcctttctaatacaagcaagtgaaatattaacacatagcatttaaaataataaatatatattttattgacagtaatttggaatgttagagatacaaaattttatgtacaattattcagattaaaacatttaaactttaggttttatttacaaatatttatcttatcttcctctcctatttgacgttttagctcaagaagagttaaaatggaatgcatctgtagatatatagttgggaatgcgtgttcagtcacttggctctgtgataataatcttatgtaccatgtcagacagattttcagactccagatcctctttgccattatctgaatttcctgatgagatatagcaaccagagtcccttgggcagtcatctaactgtgacttatttaaggagatgtctgagctcaaggataggggctcaggttcattttcttgctcttgaataactgtaaatggaaaaaaagggcaggagttaggtaaagcaacacaaaatcttattcatgtactcattcactttcaagtattatcctattttaactgttctaaccatgacttcattacaatggaaagttctgcaagtaaaaggtatctttgtttattacaaaagagatatttgcacccaaatattcaagctactgttttattagaagccaaaatttgcccttcattgttcatttgcagtttcatggaattcatgtgaacttcccgcatcagcaaagatcaatatggactctcattttacattaataataagttgccagagaaagcagattgtatccacagtgtgactgatgccttgtccaaatactccttaaagtatcattagaaaaaggcatttatagtttaaatgcacaatccaagtcaatagtgatctttgtgaacaattttagattcatgataatctagattaattaataaattatcactataagtaagaatgtacagtaggacttcaattatttggaagttaactaataaaactttaaatatccagaattttcctatgtttgcatgtatcacaaaataggcataagaaaccaggttgcttttagaaagtaaaacaccaaaatttccactgaatctactttatgaatatttagtcttccatatctttgtctgtagtcctgaagaataatcatttattttcagattgataattctgcattcttaaagcagtgttctatattcaacaggcattatcttttagaaaaagattactattagggatataacaaaatatattttggaagaacccctaagcagcctgaagttcacatattactcttctcgattcctttagcgtcaactttctctctgtccatgtggtttcttgatgggtgtttctgcatcctgagctgagctcctcagagaagaaatagatctcaggtactgcctcttagctgcagtaccatatcttcctctttccccttctaaccttggggcttcaccactgtaggcatctgaatagctccacgttgaaagagccaaacacacatttaaggttgggacaagaactctgcctacagaggctttgcacttcatcccattccagtgagaataaagtaaatccaaacctcagaatccttcaaagaaggaaaatgtataattttcttcaataggctattataatgctaattaatttatatctaggaaatctactctttatcttatttattttttatatatatatatctatcttctttaaaatgcattttctagtttccatatgttttgctaacattagtttatgatccactgtgtgtccaattgccatcaacttccattataaatgagaattgtgctgtaagttacccttgtgttaatgaattaacttctctttaatgtttatagaatggtactagttaagcatcatccatgggagaaattgaaaagtgttacttaaaatatctcctaaattctgtagtttagaagaaaaatactggttgagaaaggctggaagaaaatgataaaaattgcttcttagtctgctcatcttcagaatgagtcataacagttcttttaaccttttccttaaggcttgtatttgcaacagtgaaaccatatttatgccattcttctgaatcttcacatttgccccacaattttaactatagattcaaatatcaggtatttgcctagtgatattataactagttctagatataagatgacaattttaataggcacctattgtgattgttatttttaaattttagctaccatggaagcattttgtgtgcattattcatgacaatctttaagtttgggagggtttacttattattcactagtctttctgagtatcagtcattcactcttctttctaagcccttttttttaatgaaaaggcagcactaaaatgggacctcattctctgaagaattgctttctatcctgccttggcttttctatcttattgccactgaaatgaaatgagccagctctgtgttccattatccaagtgtttctagaaaaggccagaggaattagtgcttttgtatgcattctgccacatcagcaatgatcatcctatttggagtgtgaacctcttagtcataatgattgtggggataaggccacatttccccagattatgtttgggccaatattacctcaatgcaaaattaaaagaactgatctacttcccttcacattgatatcctaaacaagacttggcataataaaaactgtttgttcccaacactctgttctatttaggttgattaccaattgtggggctctcttcaggatatgaagcagagtctttaagaactgtaatttccaaaattagttcttttcctttaaaaaaataaatatttagcttgttatttcactctcagaagcctctgtgcattcacctcaatggggaataaagtaaataaattaaaaactgtctttactagagaatatgtcattgtgtaatattagtaacaaaaatgtatttgtttttatttccacatgagaaatgctatatcatgttctctaaattctaggaatggttttgttttaaacacaggtcatttattgtagaaacctttcatctgcaatttttatggaaaaagaaaatagtttctgagtatgaaagttatgcagcacggtaatttacagaacagcagtaatttgctaaatgatttcctcgtgaaatgaaaacacgactgtgctcctcaaatgcttcctaccaggcttgcaataatttcaggcaggtgatcagctggaactctcaactgtaactataaaaaggcaggtcattatgttatattacggagatgaaagctatatcgcattcacttttgtatttggaggatcaagattttcctcttcttgtttcttttcatcctgacactaatgacagggattggcacaaacctaggtcttgtgttatgggtgtttctttcctgcagaggagatgaattcacattaatgcatccacattttctttctaagtcatttagtcccttcatgtggccatgaaacagagtaaagctaactggcctacccagaaattgaaaccataaccttcatcagttttgtcccatggttcaatcatctgggctaaccaggcaagtaacacattggaataagaaacaggtttgcctacaaaattatggacttcccataggatgtttcagtgcatctttttatactaaaacgtttctgataatacgctaggtttaaaaaagtatacataattcatgtattctattattacaattatatgaaaacacacatacgcatataacttacaaacaaaagtgttcaaatttgttaattttccctctatttctcaggtcatccacattgtttttaatgaaagaattaaaacggtataatttttcaataaagcccccaaatggtttgtaaatatcttaaaggacatacgtatctaaattagaatacactgaagaattattaaataatttgaataagggtctttcttattgctgccagctgacagcaggcatactaggaactccagaaagctgtataattctgtactctatataataaaaatagaataacatttaaaaattacttaggaaatattttatcatgaagagctaatttgcatattaaaataatttatttcctaccaaaattgttacagaattgtataaagcccatgtaaaaacattttaagatagttatcaatgttgaaagaaaagggtggcatcgtgatgaaaacagaagacgtctaatataattattcacaaaataattatattggaattttgacatttaattaattaagaaaggcaatctcaattatactaaaagtgaagatagttttaaggaaataaaactggatccttattctgggaaaaagttctactctaagaagagaaatctgccccacctttacatattaaaaaattaaagattcaaaaaaatgaaaactaatttttgcttgactttcccagatttctttgcccaaatcatccagattttgtctttaccatcttgcttgccttagctttctttgggtgaagtactgtaaaataatacaaccttaaaggcataggaaaattcctggctaaaggaatctctcaataaataattttttaataaacacaatgatatttagatgaattaaagggcattggaactaaaggagagcaaaaaaggaattttgttaaaattcatatgagaatacctctcagctccatcaatcatcctcctgtttttctctatcctggggccatctccaaagtggcaaaacccagggatacacatcttaggatgactcaaaacctcagtctcaagttttaacctcactggagtcactcaaatgaaaacccagccactgttcaggtaactatggctatatttatttgtccagaggcagcgttatccagggaggaaattttagtggacaacatggcatgtctctcagttattttttatttcatctaaagcccattcttaagttacctgaacactttaattctcctaataacagtgaatatttggtgttcatttcacttgaatactaacccaccttttggaaacacaacaacaaattaagaataggattccattcataggaaaataactggtggcttctgttcccctgaggccatgagaagatatggagttgaaatgacttcccctcctcttgcatatctctttttggagcctagcttctaacgagatgtgtacctggaaataaaccttttcgctttcagctagggcaatctccacttccactgtgctaggaacttcagcagaggcagaggcatactcactcaagatcacgataactcagcacctacctgggcaatctcattagactgctactctccccaaccatacaccatatggagggctttggtcccaggaaatatttaccctcctcagttaaagttgtcatattgtactgactattttggtaatgaccaaataacgtttaaaactgtcacacattatttaattaggggccttggaaagtcaagttcatatttcttataggttaattaaacccatttacatgatgaaggagttaagaacacattaccccaaaatatgctgctctggcgtattgactattttgagttgaaggcacttgaagagagcaggtgcaagaatatcactctggctttccctttttttttttttaagagagagagaaatagggtctggctaggttgcccaggctcgtcttgaactcttggactcaagcaatcctcctgcctcagcctcccagagtggtgggattacaggcataagccaccatgcctagtctgactttccttctgcttcttaaaagcagatgacatttccatgtgaaagctaccttccctctaccagaagaaaagtatcattcttatcatcaaggacaggaagttgaggcagagggaaatctgtacaaacaagccatgttaaacaaacccttatctatctaaccacttcacccaattagctagcctatttcaagcttctgtgacttgtcacattttcacaacttattattctttgtctaattcagtatacaagtgttcaactctaactgcatctttgggtcttcatttcccatgaagcctcccttgtcacatgaattttgtgttaaataaatttgtgtgattttctcctgttggtctgtcctatgtcaatttaattttcagctgtttttaaaagcctaagagggtagagataaaattttgccttccctatatagatatgataaaaaactaatctaatttcattatgtctaaaactattacttttgacaaaaataggaatactgtgcatattagtgatctacaatttgctttcacatttaacatatttttaaaaaactttaatatcagtaaacagcacgctatatcatttttttaacataacaccttcaaaactacttcattgtttgggtatatcttaatttatttaacaggttaattattgatggaagtccctattgtttttagtttttacccaaaactactagatttttagttagtatttttgtgcattcgtatcttgaattttgtaggacaaatacttagaactggaatttctggatacaaaagtgtgcatattttaaactttgattgtgtttcacgttattgccctccaaaaatgtacttatttacactcttgcacacatgcatggttagcatattcataaactaatcttgacaacatactcgaataccgatctgcttattacaaatacttgtatgtgtgaggtgggattgcaggcaactttatttttataataatagaatactgacttactatttggggatcttttgacctcctcattcatcatttactcattttatgttaaccatccactaatgcaaagcacaggactaggggctttgggaaagcatgtggtaatagaagattcggtcttgtttggccagggtaatcattacaaagctatgtgttgtatacaatcccagtgcaatataaacacaggtacaggagtgctctatatatacggccattagagaggtccttatgtgactaaagtgaaaaatctgtgaacacttttcactggaaattttctggtagaaaagtgagaatccttatactttattttatagttttttgtatgatatagaatatggcatccatcataaatgaaagtttggaggtaaaattaaaaagaaatctgaagaaattaaattgcatgagggcaaacaactatgactatagatattaaatacatacaagtaaaatgcctgcatgctttctctactttgtgtggacaggtagcatagcttttctttaaagctgtagatttcttgaatctagatgcaaatcatatggcaagtgggttggaaactccaggtacacatgtcaggggctaggcccaggctatgctggcacactgttaggccaactgctggactgctgcttggcataaatacaaatctcccctgctgacagctcgtgttccaggctcctggctgcggcccgccatttgccctgcatcgacttgggcaggcaggcaggcaggcaggaaggcacaactggggatgcttgagcaatgaggggctgctgtgaccacagctggtatcaacattctggcacacaacccaccctttccccttcctcctcatttggcactgcaaccagagtttgcaggtacctcaaatgcattgtatacagattctgtaaagtttgcttattctgttactttgttttcaattttaaatttaattatccctgtaatctagagcaaacaaggtatttccatcacccattttccccaaggacaatagtacacattctcatagacacaattttaagacacattggagtgcttctgaatgtgaaaaatgaggaacaagtgcagaataaagacaagatgtttactataaacaacagtaaaccagcttattattctaaagaggacttcagagtaaggcaaaggggccttgaagattgtgtttatggaacaacacacacacacacacacacacacacacacacacacacatattttctgttctcttttttatttgggaatattgacttccaaagtaaatgaaacatttttaaattcagataataaatagaaaaacctaaatgtgcacaaaataaacagatcctgctctcttgtcccttcaagagctgcatctcactccaatttttcttctccctataaccttatctagattcccagttgagggaaccgatgacctaattcctctcagtttaaatgcaacacaggagcaaattccaaatatctatgctggtcttgctgggattgcagaaccccagggtggttatcctcctccagaggtaatcctgtgatcagcactaacgccacataccagccctttcatcagcttgttggagaagcatctttacttcccaccaagcagtgacctagataccatctcacaccagttagaatcaggatcattaaaaagtcaagaaaaaacagatgctgaagaggatgtggagaaataggaatgcttttacactgttagtgggaatgtaaattagttcaaccattgtcaaagacagtgtggcgatccctcacagatctagaaccagaaataccatttgacccagcaatcccattactgggtctatacccaaaggattataaattactctactataaagacacatgcacacatatgtttattgcagcaccattcacaatagcaaagaattgcaaccaaccctaatgcccatcaatgacagactggataaagaaaatctggcacatatacaccatggaatactacgcagccataaaaaaggatgagtttatgtcctttacagggacatggatgaagctggaaaccatcattctcagcaaactaacacaggaacagaaaaccaaacacatgttctcactcacaagtgggagttgaacaatgagaacacatggacacagggaggggaacatcacacaccactgcttgtcagggggtggggggctaggggaaggatagcattaggagaaatacctaatgtagatgaagggttgatgggtgcagcaaaccaccatggcatgtgtatacctgtgtaacaaacctccatgttctgcacgtgtatcccagaacttaaagtacaatacaaaaaaaaaaaaaagtgtaatccagtttacattttcaaggtcaaagtgggtacaatgctatctatcttgggctaagaagagaaaaggaaaaattcttgctttaaatcttagaagtctggtttttttccctgttttgtaccccatcctcttggtctctctagatatatttaagactcacataggacttgtcttttctacattatctcaaaattttagctcttatcctcaagatatgtgcccattttgctcaacttttatattgcatgattagcaaagcaaatccttttatgttctcaatctaacaatgaaacaccaaactagaaatttattgccattcctcaaactgacatcattcaatgatcaaaataaaatgcatccataatatcctagaaaatttacatgtcccattcttaaaaagaaaggcaaactatttttaacgtttaacgtgacatgcatttgtttttaaatgtctcagttttatataaccatatactcaaggtctttatcattcaaggtacaggaaggttgtgtgtttaatctttagcatggttgtaggagatatgattcacagagtagaaaatagataaaaataagcatgcagccagtatggtgccaaatcatcagaactcgacatcttattgacaaatggaagtcattcttctttatttcttgagcaaagcagtttcataaaagataaatagctttcagtcagaatagcctaacctgcaatatgcatctttttgacatgtatattctaatactactctagaccataagattaaaataagaaaaatctcagagtagtgtgttgacaagaagcactggttgaatctgtattttttttttccatttttcatctcccagaatttggctctgtgtatgtttgtaccttactggctgtcattaagtaatcaacttctagtgaccttcaagcatcattttctaaagttttatgcaggggaataatttctgggacatgtccttttttatatcaaacatcaaaaaccatttaatgctttggagacactatgttttgttttcagagaccaggataaggcggaacatgtttctgatagatgtaagagactgaattatagatttgtgagcttgagaaagccacttagctacttggattttcatcttctcaccttgcaatggaagaattttgcatcaggtgtttcttttctttttttttctttttaattacatcggctctataaataattttaccatctatgaataattgttcttttgctagcatagaaaggagacaggtgatgagtgaagtggaatgaaaaaattaaggggactcaagcctttggcactgaaaccatcttccctctgtgggcccctgaggatactgtttattgctgaaagtgctgcttgcccaggttcccagccccttctctccacaaaccctgttgacaggcagccatggaagcctctcgccttttaccttctgatatagaaaactgaatcaaagcccttgagaaaattggtgaagtagcagaaaacttcaattttcaaatattcattgctttcatattggccaatttgcacatgtggaggagttttacagcagactccctttgattaaatctccatctctgcactcatctagctgttcgacttctttgaaattcatctccaaatttttgcctcatctgcaaattgggcaaaatacctagatgtgtgctattatggaagaaaagcaatcatttacaagtgttcaaaaaatactcttctcctccctgtacttcatggtcaaatcattttggagagtattggcaatgacactggacattgtccataataaaactctatagaatctacttctaagccaaacattgtttagtgaggagccacgtcttgaaatgacaagatgtgaatgaaactgactcctttacctgaacgaacttactatatctgtttacactgatcaattttgtcttgacttgaaatattgattagattggctactttctgaagcttgaactttgtctgcctctgtgaccacatctccctctcttttgcatctcccagcctcacaacttcaaagaaagcatataataacctaggcctgatgatgaaatcagttctgctgatgtcaaattagttatgcctgtgaaagctcttggaaaaggatgataagaataaagtaaaaaccagtttcttaaaaagtaaactacttttcactagataaaaagccagtgtataggaaacgtgtgctctacctcagttttgtgggacttatgagagagagtatagaatagcccacaaaaggacaatcaggaggcctggtccctaaataacgctttcctccctcctcactctccatctgggctgttacttgtagtgttagaaagtataacacagcagcacatacattgggttggaatcctaactctacacttcactaagggagtgttcttagacaagttacttgctgtcttaactcatcataaaaatgagggcggtagtgtctaactcaaagaactggggtaagtactcaagagaataatcaggaaagaccctggcccagagtcttgctcagagcacatatgttttaaaaatgtagttaataattactagtattatttttactgctgggtgcggtggctcacgcttgtaatcccagcactttgagaggccaagatgggcggatcacttaagatcaggagttcgagaccaggctggccaatatggtgaaaccccatctctactaaaaatacaaaaattagccgggtgtggtggcatgcctataatctcagctactcggaggctgaggcatgagaatcgcttcaacctgggaggcggaggtcgcggtgagccgagatcgcaccgctgcgctccacccgggacagcagatttagacaccatctcaaaaactaataatattaatactagtaattattattagtagtagtattttttgatagagaaggctggatttgattatctaagttcctttttatctttaaagttagactttccccttttggttgctcacaaaatactccttgcagagtttggcaaaccctaacgtcagtgtttgggggcctgaccggatttggcaggaaaggcagtctggatggataattataaaaaataaaagctatcctatctttacaagcctggttgctgtagacaatattctgtaaatctccaagattatttcatcttcagttaatacttacaaatacagagaaccatctcagataataaaagtgagtgctgaatatttttgcaagctattataacattttgaaagagtactataaacatgtacaagatgtgactatgtggtcataaaatgagttttcctgtgtgccatgaaggctcattatcttaaagcctcgtgttgttctacagaagccatgtgtgacatttcgcactaatggcttatgctgttactaaatacttgtctctaactccctcagtctttgggaatgcaggcatccacttgcatgtaaattaatagctttgcagagtggaaatgaggtacccagaaaagtcctttcatttcctgagtccaataaggaaataagttccttttcctaattacatatttgaccagagttattgttttcaaacttatatgaaaatacctattttatgggaaagcgtgctttcatgatctcagtaaataaaactggggctttgtttctaatgattatactatttacattaaactgattatcagctggggagaagagtaggtgtacacacttactttcttcttcaaggaagttttcagcagctgatagtaaccttcttctgtcatctgggttttcaatatttaattcaatgaggtgactctcttttatatcttttaaatcttctagagtctcataaccattgagcaaaagtgttgaggtgtattcctgtaagacaaaaaatataaagcaaattagtcagattcaaatattttatttttagttctctttagatttaaagaaagtatagagatgcacatggggaccaaaggtgccaatagaacttttacttaacttcacttgtattcgtttctgacatatgaactccagggctcttaaatgattatgttgtataattctcgccttttggaaggccaaatgtaaagaagaaataattaccttaagctatacaattccaaatcatggataaattaaatagttggatcatgcatcccatttggaaatgtttcacttctcaactaactaaattgacagaactagcattactttaagtctatcaataaaatgcctctagcagagtagcatgctacagcaatatttcagaatctacatctcttcttgttttcatgattgcaaaagcatctactctcaaaacattcttggggtaggttaaaaaatgagtttgaaacagatgtaattctatacaaaaaagtgggtgtagcattttgattgaaaggcattatgtaaaccaaaagaattggagactttctatttaattggaagcttttactaagcatagaagcactgtagttggggaaagaattgttttctcagcatgtatattttgtccgtcatttgaatcaatatgtattagtttaaaattcataggtttccgatttcaaagtctgtatgttattttgaaacctctatcctctcaaacaaaataaaaatattaagtgaagttgagtgctttttcaacttcttcagattcctcctattttacttgctctaatttcaatatccttattttaattactaaaatagaataagaggaagtctaaaagttttaagtaatcagggagaacttatgaccacccctttttaacaaaaaaaaaaaaaaaaaggaagaaaagcaagaagaatgacaattctttctttaaaaaagtatattcttagcactgaattagaataaagaacacaaaatttcctgttctgacatataaccatttaactgtgcattcttggggaagtcatttcagtctcatagaccttggttttctcacaggtcacacaatgaacaagattcagaggcaagatgctaacccgtacattctcataggaatatcccatttgaggtgcaccaagagtaatataggaaggcttagatagtgtgtttacagacaggaacataactagataattcagaaaaaaacaattaagaaaagtgtaattggctattgtcttggtgaattttgaaaactatcaaagtgctgctgagttaattttagaaatggattgcaaaactgtaaattcattgatactaggtgtagtgtatgtacacactatttaacaaggtagatatttcaaaagaattttggtaatataacaagaaaatcataattgggttacagatacagacaacacagtttccttaacacaatcattatgcggcttgatgatcaccgtttccctcaaattacttttaaaatgattatattcagttatcttctctcaacttgattttgatctctgcttggtagaaaatacaattcccttctcatttttcctttcacttttttagacttactttattccttatactctctttaccattctcgtttagacattttcttagggctttttattctcctagatatttttcatttttcactgcattttctcaacatcaatctctattgtcactgctaaatactattaaggtatagtccaagggatattatatcaagacttgtccttgcataaaaaagtaataaaagagaaataagagctcttctaggaaaacaggttttcctttgcttgcaagacttgtatttttaagcaatgcaacacaaatactgatccactcccttcggtgtttccatttacatgcttccaaaagcaaacagaacacagatttgctcacctgcagatgaatcctctctaggaactcctgcagagtcttggattttttgctgttactccttcggtttgcctttattttcttgggggctgcttcctcttctgagatgacatccacataaatgaatttgaagtttcccactttattgttcaacattcctgtccacatccccattggtgttttgcaaataatgtctatgatgtctcctttctaagggcaaagaaatccatacacattagatttcagagaacctcactgatagaaagaatgaaatcatagaaaactagaataatgaggacattatgctaaaggggttcagatataacagaaacaaatctaaacattcacttgcttcaaaagttcaggctggtggcatggtgggtcatgcttataatcccagcactttgggaggccaaggcgggaggattgcatgaggccaggagtttgagaccagcctgggtgacaaagtgagatcccatctctacaatttttttcttttaattagcctggcgtggtagcatgtatctgtagactgaggtgggaggagttcaaagctgcagtgagctgtaatcatgtcactgcactccagcctgggcaacacagtgagatcctatcttaaaaaaaattcaaagaagttacttactagttataatgaagaaaacttcaacattcttgacaaaaagctctcacatagtttgatgacatgtttctgtttctgttattgtatcaatttatcaacttataactgtagagtctgcagtataatttacaaaacacttttgcctactctaagttatttttgctcacaacacacttcttagatacataaaggaggtatcatcattattaatgtagatattacagaaaaagaaacagagatattaaacgacttctcaaaagcttgcaggaagttaacggcagaaccagaactcaagttcaagttatcttaaccaaaaattgatgctctttttatttatactgtcaaagtaatatatatgtaacaaagctcaagttatcattccaggaggtgctccctagctggggaaggagatgaaagagaagtctgttactctatatatttctagtgcatctgaaaaatttatctatggtataaaataaacccatttcaagtatttcattcatctaaaataaagaaattttgcagaattcacataaaagtatgtgtacactaaggataaattatgctacttaattctttttaaggtattcatgctctcctcttattaagaagagataacatttagattgagctcacagcaaagtttagattgaagtatgaatgaatcatattagtatggacaaaccaattggtctttttctttactcacatctaagaccataattaactataggctgccagttattggcaagggtagaaaacctcatggggatatttatttgtaaagaaaatttatttctatgcaaataggatgcctatgttcaagagttatagttcctcctttgagacttaaaactttctgccccagagaggactttacagattctaatatttttgccctttttaagtgtctatcctcaaacaaactaagcatcaagcctgctactaaaaatattttttcctgctgctctgagaatgtgtgttcttccatctaaaaaacaaattttacttgtaatggtataattcaccatgactgaactaactggtctatcttgtgatcatctgtctgtctagtcctgtgatctgttaggctttctgcctttaatgaaagggaatcaaatcataggttggatggtatcagctagggagactgagaagctctcctgaagctctggaaagtttctaggcatggaaacccttcactgcatccttcctattatccttgaaacttgtaaatttgcaactttatcctttaaaggtatatacctgtgcattccaggaaagcccacaggtcatcaagcaaagactcaatttcattttggataagacccttgatggaaataatagtatttcaattttcatgggtaactggggaattcctgttgtgtcctgtaagagctccacaaaaactcacctcaggcagcagcagcagtggtcccttggcacggtattgtacggaagttgaaagactatcctgagtcaaactgtgttgtgtttatttccttctactgctctctcccacaatggttactaggttatgggtaccctttccccaagacttgaacttagacatcagatcattccatatacataactaaggagcttactgtggggaacagtgcatttttaattctccagttgagctcactctgatttaatagcatggaagggatcaagagaagggctgaagaccttaaatgttaaataataatataaatactccataatatatcataattattagttaacattggtttagtgttaacaatatagaaaattcatactttatgccctttgacttttagcactttgtgatactagaaaggaataatttaacatctatgaattcttttagcgcaaaaccttcttctctttgtgctattgtaactcacccctctccttgagtgtgagcaggactatgaaaatgatggatatcacactcatgattatgttacccttatataataggagggactttgcagatccatttagtgtactgaattatttgattttgagttaactgaaagggagattatcttgatgggtctgacaaatcaggtaggatcccttaaaaaaaaagattaaggcctgagtgagctttttcctgttcatcctgaaagagccaactgccgtattgtagagagggccttggctggtggaatctagaggcttagaatggactccagttgatatccagcaagaaaatggggtccttagtcctacaaccacaaggaactgaattctgtcaaaagccagtgaactcagaagagaaccctgagcctcaggtgagatcacagctttcttagaattcagttgagcccataattatgacctacagaaactgtgagccagcaatacatttgtgttgtttgatgcctctgagcttgaggtaatgtgttacacagcaatagagaatgaatacagaggataagagtaagaagggggaattcaggagggaatatcaccaggagaaaggtctctggttactcatagcaaccaacttaaaaagtactagacatttccggggcatcatggcagacggcaggcaggaccagattgcagctccaactcgagcagaggagtgtgtggatgctcacatgatgaattttggctccagaacgattgcagaaataaattaggaaacctgggaggactcacagatcccctgaaggaagtgaattcctccttcagtaaacaggagacaatctaaataccgtgctggcatccacagctgagaggcccacagacagttaacatcataagactctgtgcagacaacccttagtaccagcctggagcctggtagactagttgggtggctagatgtagaagacaggtaacaatcattacagattgctctcaggaagcctcatccataggaagagggggagagtactacatcaagggaacaccccatgggacaaaagaatctgaacaacagccttcagtcctagaccttccctctgacagaaactacccaaatgagaaggagccagaaaaccaactctgataacatgacaaaacaagcttctttaacaccatcaaaaaaatcacactagctcaccaccaatgaatccaaaccaagaagaaatccctgatttaccttaaaaagaattcaggaggttagttattaaactaaccaggaggcaccagagaaaggtgaagcgcaaggtaaggaaatccaaaaaacgatccaagacgtgaagggagaaatattcaaggatagatagcataaataaaaaacaatcaaaacttcaggaaacaatggacatgcttatagaaatgcaaaatgctctggaaagttccagcaacagaattgaataagtagaagaaagaaattcagagctcaaaggcaaggtctttgaaattatccaaaccaacaaagacaaagaaaaagaataagaaaatatgaacaaagcctccaagaagtctgggattatattaaatgaccaaacataagaataatcagtgttcctgaggaagaagagaaatctaaaagttgggaaaacgtatttggaggaataatcaaggaaaacttccctggccttgctagagatctagacatccaaatacaagaaacacgaacctaggaaattcattgcaaagagatgattgcctaggcacattgtcatcaggttatctgaagttaagacaaaggaaagaatcttaagagcaatgagacaaatggaccaggtaacccataaaggaaaacctatcagattaacagcagatttctcagcagaaacccaacacgctagaagggattgggaccctgtcttcagccttctcaaacaagacaattattagccaagaattttgtatccagcaaaatcaaacttcatatatgaaggaaagatacagtctttttcagacaaacaaatgttgagagaatttgtcactaccaagccactaaaaggagctctaaatcttcaaacaaatcctggaaacacatcaaaacagaacctctttgaagcataaatctcacaggacctatcaaacaaaaatacaatttaaaaaacacaaaaaaccaaaaaaaatgtatacaggcaacaaatagcatgatgaatggaatagtacctcatatctcaatactaacactgaattaaatggcctaaattctccacttgaaagttacagaattgcagaatggataagatttcacaaactatatgctgccttcaagagactcatctaacacataaagactcacacaaacttaaggtacaggggtggaaaaagatatttcattcaaatggacaccaaaagtgagcaggaatagttactgttatatcagacaaaacaaactttaaagcaacagaagttgaaaaagacaaatagggacattatacaatgataaaaggccttgtctaacaggaaaatatcacaatcctaaacatgtatgcacctaacactggagctctcaaatttgtaaaacaattactaataggcctaagaaatgagatagacagcaacacagtaatagtggggaacttcagtactccagtgacagcactagacaggtgatcaagacagaaagtcaacaaagaagcaatggatttaaattataccctggaacaaatagacttaacagatacatacagaacattccatccaacaacctcagaatatacattctattcaacaacacatggaactttctctaagatagaccatatgataggacataaaatgaatctcaataaatataaaaaaattgaaattatatcaagcactctttcagactacaatggaataaaactggaaattaactgcaaaaggaaccttcaaaaccatgcaaatatatgatccctgggtgaaaaatgaaatcaagatggaaattaaaaaattctttgaactgaacaacaatagtgacatgacctatgacaacctctgggacacagcaaagggggtgctaaggggaaagtgcatagccctaaacacctacatcaaaaggtctgaaagagcccaaatggacaatctaaggtgacacctcaaggaactagagaaacaagaacaaaccaaactcaaacacagcagaagaaaggaaataaccaaggtcagagcagaattaaataaaattgaaacaaaaaaatatgaaagataaatgaaacaaaaagctgttttttgaaaagatgaataaaattaatagaccattagtaagaattcaaataagctcaatatgaaatgaaacggggtattacaactgacactacagaaatacaaaagatcattcaaggccactacgaacacctttgcatgcataaactagaaaacctagaagacatggataaattcctggaaagatacaactctcctagcttaaatcaggaaaaattagatacccggaatagaccaataacaatcaatgatattgaaatggtaattttaaaattaccaacaaaaaaagttgaggaccagacctattcacagcagcattctaccagacattcgaagaagaattggtaccaatcctattgacactatcccacaagatagagaaagaaggaaccctccctacatcattctatgaagccagtatcaccctaataccaaaaccaggaaagagggtaaccaaaaaagaaaactacagaccaatatccctgatgaacatagatgctaaaattcttaacaaaatactagctaactgaattcaacaacatatcaaaaagataacccaccatgatcaagtgggtttaataccagggatgctgggagggtttaatatatgcacttcaataaatgtgatacaccacataaacagaattaaaaacaaaaatcacatgatcatctcaatagatgcagaaaaagcattagacaaaatccagcatttcttcatgattaaaactcagcaaaataggcatacaagcgacatacctcaatataataaaagccatctatgacaaacccacagtcaacataatgctgaatgggcacaaggtgaaagcattccctttgagaactggaacaagataaggatacccactctcaccattcctcttcaacacagtactggaagtcctagccagagcaatcagacaagagaaagaaataaagggcatctaaatcactgaagatgaagtcaaactgtcactgttttctgatgatatgatcatttacttagaaaaccataaagactcttccaggaagctcctagaactgataaaagaattcagcaaagtttctggatacaaaattaacgtacacaaatcagtagctcttttatacactaacagtgatcaagctaagaatcaaatcaagaactcaaccccttttacaatagctgcaaaaacaaaaacaaaaacaaaactttggaatatgcctaactaaggaggtgaaagacctccacaaggaaaagtacaaagcactgctgaaagaaatcatagatggcacaaacaaatggaaacatgttctatgcccatggataggtagaatcaatattgtgaaaaggaccatactgtcaaaagcaatctacaaattcaacagatttcccatcaaaataccaccatcgttcttcacagaattagaaaaaacaattctaaaattcatatggaaccaaaaaagagcttgcatagccaaagcaaacttgagcaaaaagaacaaatctggaggcatcacattacctaatttcaaactatactataggctatagtcaccaaaacagcatggtactggtaaaaaaaaaaaaaataggcacatagaccaatggaacagaaaagagaacccagaaataaatccacatacttaacggccaactgatttttgaaaaagcaaacaaaaacataaagtggggaaaggacacccttttcaacaaatggtgctaggataactggctagccatatgtaggagaatgaaactggatccacaactctcaccttatagaaaaatcatctcaagatggactaacgacttaaatctaagatctgaaactataaaacttctagaagataacattggaaaaacctttctagacattggcttaggcaaggatttcatgaccaagaacacaaaagcaaatgcaataaaaacaaagttaaattgctgagacttaattaaactaaagagattttgcatggtaaaagaaacagtcagcagagcaaacagacaacccacagggtgggaaaaaattttcacaatctatacatctgacaaaggactaatatccaaaatctacaatgaactcaaatcaacaagaaaaaaaaacaaacaatcccatcaaaaagtaggctgaggacatgaatagacaattctcaaaagaagatacacaaatggccaacaaacacatgaaaaaatgctcaacatcactaatgatgagggaaatgcaaatcaaaaccacaatgtgataccagcttacccctgcaagtatggccacaatcaaaaaattaaaaaattgcagatgttagcatggatgtactgaaaaaggaacacttctacactgctggtgggagtgtaaactagtacaaccactatggaaaacagtgtggagattccttaaagaactaaaagtagaacgaccatttgattcagcaattccactgctaggtatctatgcagaggaaaagaagtcattatacaaaaaagatacttgcacacacgtttgtggcagcatgatttgcaattgcaaaaatatggaaccaacccaaatgaccatcaatcagtgagtggataaagaaactgtggtataggctgggcgtggtggctcatgcctgtaatcccagcactttgggaggctgaggtgggtggatcacgaggtcaagagatcgagaccatcctggccaacatgctgaaaccccatctctactaaaaatacaaaaattagctgggtgcggtggcctccagctagtcgggaggctgagggaggagaatcgcttgaacccaggaggcggaggtttcagtgaaccaagattgtgccactgcactccagcctggtgacagagcaagactccatcaaaaaagaaaaaaacaaaagaaaagaaaaaagaaaagaaaagaaaagaaaggaaaggaaaggaaaagaaaaccatggtgtatatatatacaatggaatactactcagccataaaaaggaatgaattaatggcatttgcagtgaccaagatgagactggacattattattctaagtaaagtaactcagcaatggaaaaccaaacatcgtatgttctcactcataagcaagagctaagctatgaagatgcaaaggcataggaatgacccaacggactttggggacttggggaaagggtgagaaggtggtgagggataaattactacaaatagagtgcagtgtatactgcttgggtgatgggtctcacaaataaccgctaaagaacttacccatgtaaccaaacacccctgttccccaataacctatggaaataaaaataaaaataaaaaatactggaattgccctgccaagtctggttcccaaggcctttgctctgctcagctctcgcctgacatttgcaccttgtctccctctctcttcattatttctattcctgcaagtatcaggcagagttgggcaccttcagcaactgtgaggcttttggttttcaggaaaatggagagaattccttcctccctgatagactctgaacctgaatcatctacataataacaacttacactaacagcctgaacagactgataccccgactccacctcacatattttattcaaattcttagcactgggccaggcgtggtggctcacgcctgtaatcccagcactttgggaggccgaggcgggcggatcacgaggtcaggagattgagaccatcctggctaacacggtgaaaccctgtctctactaaaaatacaaaaaattagccgggcgtggtggcgggcgcctgtagtcccagctactcgggaggctgaggcaggagaatggcgtgaacccgggaggtggaggttgcagtgagtggagattgcgccactgcactccagcctgggcaacagagtgactccgtctcaaaaaaagaaaaaaaaaaaagaaaaaaagtcttagtactgtaagctagcctccacttctactgttgggaagaacacactcacactgtcttcccactgcttatacttgctgaaacagatcatataatcagcatttgacagaccattcagaaggtgggatatgatgtcctctcaccttgattttgagggagtcagtgtcatagggacttggcgtgaaatccgtatgcactctggcacggccacagaatggtcctgaataggggccatcgtcatccagtcgaaagctgtcccggttacttgtaccatctgaacagcttgttatgccacctgatgaaagcagaagttcacagttgtcatggaagacttataacattctgaatcatcatctggacacaactaagtattgataatgctggaacactggatgccaggctcctgaggaagttctaattgacccatcctggtgtctgtcttccagttactctccatcagtgacgtctgtcctctgagccatttcgaacctttttcctgccaatctggccactctcctctatcactaacccaagtaccctctcacttcagtctccgtaatcggatccagtgcacaatgtactaagtattggtcacttgccaaaagcatcacattacaaagttccctacaatttcctccccagagttcccactgtgtaccaaaggccattttgaggcaatatttctgtcataacaggtggcacttttgcttgttgtatgagtgcaagggaaggagaaagtgtgtctgaatatctgcatccccatgtggtttgaaacttctaaactgggcctttaaaactgctccaaatccttgttgtctggtcctcttatttttgatcttaaacttcaggaaacagagaaaagagatagcattttgtcacctgtctgggaacaagaatggctcccagtggaagtaattctcctcccccaccctcatactcagtcaccacttcacatcttccttcagtcaagcctttcatcactctgttcagtgagggaatagcccacgtttcactaccatgcattgtggaaataaggtatagctccttcaagatgctccacattgtatgtgaactgatgtaaaacacagatgagttgcatctaatcacataaattaagtggtatacagtaatggtaaaatggaccaccatctcttcacaccctcccttccatgacaactccagaccagggcttttcgcagtccattctagttaataaaattctccccacatccagcatcacaatatagagtttttaaacttccaggagaaattaatactaatgagatctgaatttcatacatgcaaaaaacatcctttaaatgtttctgtgttagcttttgtcacaaaataactattctacagccaataggaaaataggaataaaactcaggatatttgaaacatctggtcttgccatacatcttcagataacagaagcagttgatttaaaaggaaatgggaaacaaactttgcaaaaacatttaaaaaccctgaaaagattagagagatgtataacagtctacatacaaaaagtcataaggcaccctgcaatatcaatcgtttcatccaaatattgtagctggaaatttgactaaatcctgagtgatttccttcttagaaaaaatattaatcttcattagaaaatccttgttggttactttggatccctttttgccacctaattggtcatagtcctaccatttattatttgcatattgcttcactctttactgattaatgctgggttaagatctaaaaagtaaatgtcagtaaaagtaaattgatgcaaatgtgctacatttttcagagtacttcaggaaaaaaggaaagtggtcgggggagaaagaatgagggggacgcagggaagaggaagggagaaagaaagagacagagaatggagcagaaaataaatttcatttatctgaatacttcaagtcattttgaaatatgttgactcaagataaaggtggctcactccaacaaaggtgtttattttaaagatgcaggtttaatctcctaatatggcttttttgaggagtatcccgaggagccccgttgactacagtgttaaaagttttcacacactatatgactgtgtcaaatatattatgtattatttaaacaatagcaactctatatagatttaatatatcttacatttttaccatttctcttatcaagtagctggaaccttgtggctgatttaacttgttgttttttaattaatttaacccagacctcacacccaggatcttgtccctgattcattagccttacttgatgagctctgtccactgtagagactatccatggagtcactggctttgagggacaccttctctgtgtgggtcccaatcacagggtcactgtttctatatgggtgggcattctctccatcttcctcatccttcagaaaacatatcagaggttaggtacagagagaagatttccacagagatgtacattgagtacattgatttaatagacacatattttagcaataaaatacttaaggatacataaggataaaatacaaaagtagttcatcttcagttcaatttctagcaaaacctttcacaatatacttggaaaaattactcagatgacacattctttctgtaaaattcagttgaaattataatggctcatttttacaaactaggatgaatatcatatcaatattatttaatcaaaagtgttagatttattgacatctatggtttatcttttaaagcacttttacttcttcatgttgtccttatgctctatttaccaccattactaatccattgagatctgatcctacaagcttaaactctgcatagttgtttcatgtcagttatttgcatcctaccagatcactagatatgaataaaacatgtacattttgcaattctaaagcaaagcttatctaaaaagctttacaaatctaataccatgcttgccacctagtcaagtgagaagcaaatcttgcataaaattagaaaagacagacaatttcaaaacaaattatattttcttgaaaacatctccaatgttttccatatttcaatagtttggattaaacctatgaatttcttaatattcatcagaatgtaattcaacattctttatttgtgagcatttctaaacattgataaaacttcagaatacacaaatgatatacactcagtttgattctccacttttatccatttcttttttgattcagtcattcaacacaattttatagaacacctcctaggtactgagcagtgttcttggaactggggattttcatggtaaacaagataacagggtgcttgctataatgaaggatattctattgtgttagctgtgtgtgtttgtgtgtgcgtgtgtgtgtgtctgtgtagagtatttggggaggtgtgtctaaacacaataagacaatttcagagaatagtaagtgttatgaaagaaataaaactgggtgatgtgagagaatttgttgctgaggttagggttaggggttggctgatttaaatggagtatcctccaaagacctctgccatacagtaatatatgccctgaattattgacctaaaggataagaagatgtaacttatgtgaagctttggagacagttttccaagcaaaaggaatagcaacagcaaaataattgaactcagaattatcttgggttgtgcagggaaaacagcaaggctaatgtagtgtgagaaaggagaatattagtgtgtgagttcagggaagtagactggagccacatcaagaaaagctttatagaccatgtgtggtggccatggaaatgtgccacttagatctcttgctgcgggacccttctttactgacagtcccaggactgcccctctgtatccatcactccatttgcactaaagccatgctccctttcagtaactgaaaaaataggggtattgtttgagcccattctagtggaatgtagggttcctgtaatggaaaactttagtataagaatcctccatcaatctgaccaaagctttctcagtattctgctgaagtatgagactctctctacctgattcttcttccttttcctcatccttttacagatgtcagatttacgttgcagtctaaaggctttctctttagccttcctagcatttcctgtcataaatctgtggtgtttctactctttttcttgggatctagaatgaacacaccaagtaaagaggttcactatgaagacactgaaattttaaccatgacctgatttccacttgtcagagatatttctggctttcatatggagaataaattttatgggggaaagaataaaaagaatggaaagcaattaggggattatgatagtaatccaggaaagaaaggttggttatttagtctaaagcaggaatagtttacatggagaaattagggagtttatatatacgtggtaatacaattcagagaatttactgatgaattagtgtgaaaagtgagaaaaagaaggaatttagggtgattcttagattttcttttcttcctattttttatatttttgtttttatttattttggggatcagtgttgtctgctgccactgggaatactggatgagaaaaccattttttttgtaaaagtgtagagaataaatatattagctttggatatattaggttttggatgtctactggacatctaaatgaagatatcaaataagcaattgattgtattaatatagcagataagtgaagaggtcatagctagagatatagttgtgaaaaacaaaatcatgagagtagatgagctgacttaaggggagaatgtagattcaatggagcatccaggaacaagcctcaggaagatgtttcaagggatgagaaagaaagcagagccaagaaaggaagctatgaggaagaagaaatgccagaagcatgcctagtcaaaaaaaaacaagaaaagtggatgttttatatgtaaggaaatcagcacttgggtcaaatacagttgaaaagtagtaaggagaaagaaaagtgaccattggacctggcaacacagaggtcactactgacggcgacagctattttaatggagtactggagacagagccctgttgaagtggattgaaaaagagaatggacataagacataaaaatcaataaagtagaattgggagtccataagtaaactcacttatttatgatccatatatttatgacaatatatttatggtcaattgatttttaacaagagtaccgagacaatcaaataggaaaagaatagtcttttcaacaaatagtgtaaggacaactatatatctacatgcaaaagaatgaaggtggactcttcctatatactgtacagtaaaattatcttgaaataaatgatacaccaaaatttaagagactattggcctcttagaagaaaacatgggaataaatcttcattacattagattagacaatggtttgttaaatatgttaccaaaagcacaagtgaccaaaaaaagataattggactacaataaaattaggaacatttgtgctacaaacaacaccatcaagaaaataaaaatacaatccacagaattggagaaaatatattatattgcatgtcatatatctgataaaaaacttgcatccagaatatataaaaaacatttaaaactcaacaataagaagataaataacccaattaaaaacgaacaatggatttgaaaaacacttctccacaaagatagataaatggctaaaaagcacatgaaaagattcttgacattattagtcatcagggaaacgtaaagtacaaccaaatgtaaatcaaaatcacaatgagattccacctcacatccactaggatggctagtattaaaaagacagacaataacaagtgttggcaatgatgcagagaaattggaaccctcatacattgttgatgggaatgtcaaatgacacacctgcttaaaaaaacaatttgccagtttctctattagacatggagttactatatatccaagagaaatgaaaaaatatttccacacaaaaattgaacagaagtatctgtagcagcattattcataatagccaaaaagtgaaagcaacccaagtaatcactaagtgataaatggataaagtaaatgtgatccatctataaaaggagaaatattatttggcaataaaaaggaatgaagtactgatacttgctactaaattaatgacatgttgttcttcacattgttcttcgcatcacattctagatgcatgatctttttttttgttttgttttttgagacgccatcttgctctgttgccaggctgaagttcagtggtgcaatcagggctcactggaacccccgcctcccgggttcaagcgattctccttcctcagcctcctgagtagctaggactacaggcgtgcaccaccatgctcagctaatttttgtatttttagtagagacggggtttcaccatgttggccaggctggtcttgaactcctgacttcaggtgatcttcccgccacggcctccaaagtgctcggattacaggtgtgagccactgcacccagcagatgcatgatctttctgagtgtcagtttcttctgttaaaatgaaagtaatacttccttccacccaagttctgggcataatgactgaggaagaaaacaaatgcttaagtacttcataaagtaccaagcacttctatagtctagctgaatagtttaagaaagttttagtagaaaaatacaaatgattatcagagaatatttaccttttcctcagaaagggctttgatgtactttttacccacttttttcttcattgtccatgaaatagctctcatttttttacccaaaccgcctccattatttgaagttttactttgttctccacttccatttgtgggatctccttcatgtgcctagtttagaattgtttacaaaagacaaaataataaagcaataaaaaacattgatctgaaatcactgttacagagaacattctgagtttgtggattttgcatgcattctgtgcagcagcctccaaaatttctaacaatccggacataacacatatttttaaagttgtccagccctggttgcttgtgttacgaactcagaaagtaaaattcgtgatgttaaaggacttgagcctcacatctgcaactcttttagagaattttgactattttttaaatagctgtattgaagaatcattttattccctcttcttgagatgaacaaataatattaaacaccaggtataaggagttcttatgtctacatagatgagaaatattttattggaagctttagataggctgtagcatctatctgtgttgaataggccttaaaatatcctcttgcttctcatagaaattgagatgattgtggttattttaaagaagtttttgtgttaattaaatccactgagaaatgttagattttttttcatcttagtgtgcacatttcccatattcgcaagcaatagtaaatatgaactagttccagccattagtacagaaatcttcatgtaattcacatgctatattaatcaaacatcttatttggactgcttcagtctgtgcttaggaattttgttaaaccaatgactcagaataaaacactctgttcacagccacaagactctatatgtcataacataaaataatgttctgtcaatataattaatatattatgtgatatatattacattatatagaatctatatgaaataaaatatcctcactacccaccttgcccctcgctacttctcaagtctccctcgctcactagatcagtggttctcaaaatatgatccctggaccagcggcattaacatcacttgggagcagtttgtgctttagcaagctcttcaagtgattctgatactcgctaaagtttgaaaacaactgtaataaagtattgccatgctagcccccttgcagtttctctatcaggttctcaccaagtttgtatttgcttttgccattggcttccgccagatatccaagaatttcttccttcagtcgtccaggtttctattcacatgtcatataataggagagtaattttctgattgatcaccctccacacttccatacatcctgtttattggccctgattaattattcctctaagcagttaacattacccgataatatgtttgttcatttgattattgtctgcgtctcccactatgatgcatgctccatgagacttgagactttgtctgttttctttgagtgtctagagtacttccaagcacagagctggcacttgatattatttgaataaatgaaacttctcatgtagaacgttgcagatttttttttcttggaggacatgtttgggttacacgtcctaaaataccttatatttgcaagaaaggaaacttgaaggacatctagtttaacactgcccaccattactggtaggtggacaggtagtcattcactgaatataaaaaatgatgggaaacttctctttagtgaacttgaatattttaatataaaagtttaaccacatagttaacatcattattaatcaatattatattttgcttcatatcttaccccaaattgcctatgataaatatgaatggacagccaatttaaaccctcattgcactttattaatttctacattcaaggttgaaatcaaggcaaagattctttgcttaattcaaaagtcctgaataaaatttaattcggaagcactttaaaattttagagttagcctttttcttctctctacttaaactttctctgtcttcattataaaattactttgctaacataaataagaaatgttaattactacttgtgttactctaccatttctaagcttcagaaaaatgtaccacacatatttttcaggtttttctagcgttatttacagaagctacaaagaaattatgtttatgtcttttgagtgttaacatttttctatgcctttctccatagcctgaattaaatttctatttaaatattacttatggttttgttcttgtctttttaagatttgtcttcccctatagactccaggcatgaagtaaggattttcatgtgttgttgcaacagtacttcctgagtgtctaagggaaaacctgtcatagagtagttattttttgaatgagtgctggattgttgaaaaatatgcacactattttattaggtttgctaaattcttttacaaattactaggccaccattattaaccaatgaacctgaatgaacatgagctatcttgtacaggttaattccagaattataaactaaatagcagtagaatatatgtatgattgtggagaattaaaaatttatacaaaatgccaactgaaaataaaattatatacagtttctctctctctccatatatatacacacacacacacaaacacatatatgtggccagggggagatttatatgtatatattacatttattacttacaattatgtaaatgttgattgactatacaattatgtacaagtttactcataaatgtgaatatatacataataaattaataaaagggatcattactgaaattaaattattttaaaatattacagatagttatatttgaaaataagcataggatctaaaaacctattgatctaaaaacctattgatctaaaaagaatatattacctgtaaggttgctgaatcaggttcaatggtaaacagtattttcagttttcttagtagacaccccttctctgtactattttattagttgttgttgtacctgtcattaaccacttagcatatgtggcccctactttatgagataatatggcaaactttggagtcagagaaaaggttgatttctgcctttgtcatttactcactctgtaatttagaagtaattttatttgatgaagcaagcatatttctgcaatggcaaaatagatatactaatagttcctatgttataaataggtaaattgttatagatagataaagttagcattgtgcttatttcatcgtgagtgctcaactaaatgaacatattattgaaattattacgtaaactttattttatgggaagcttttcttaagctacggttaaaatgttcatagtgtacaaatgtgtatgtagcactcaccaatgggatgtttcagtgtacattgaagtgtgagagtccaattgagcagctgtatgctctccttaacaaatttacagttgggccacttaatcttgttctaatttaaagcaattacaacttacataacattttatatatatctatcaaataatgtgtataaatacaatgtatgtgtatgtgtacatatatgtatactcacattgttttatagtagaaatactcaggaaatttggaattgtcagtgtcagtttgaattctatcttttcgggttcatgttttgctttcccaaacatctgttaggcttcttaaaataagattttacttttaatgccctgcacggtactgggtactgatagagacaggaaacagccaacggtcccttgcgaaacctccccttcgagcctaaaacagcttgaaggctgaaaaaccagactgatgatcctggatgaagcccaccctttcccaactgattctctcttaataatgcccacctgtgcactgggggaaggggacggagctatgggaaggtcgtgtggtttgctgcagggaggagcctggcctcttttgttgttatgtggtagcctgggattcaatctgtaaggtaggagcctgctagcaggactcttgctttgttgagagttcctctttttttttttccttttcacccgatataccctgccctactcaccctacaatgtgtctgtgtgcctaaattttcctggtcgtgtgacaagaacccattgctttccacaacagtactaaataatggtttgttcatttatcacaaaaacatatgcaaggctataattttaaaatgtattcatttttcttattttactttgcaaaagtgacattgtcttcataatatttcataatgtgtttgcataacattcataaaaatggaataaactacgaacctcagttgaatcatctggttttgataaagaattattccgaaaacgatcgaaattcccaaaactgctgcttcgctataaaatagaaaagaaaaagcaaaggaaacttagaatttattttcactgtccaaactgataagtatattagattatagtttaataagcaccgtctcttgcaaatacaggctttaaaaagctcttctctctggaatatccaaaggctgtgaaggtatacctattaacatttttatatttacagttgatcaaatgtctttctacgctttttgtcatagcgttaagtaagcaccttggagaaaatcttggttaaattattttaaattttttattttaattttgctctttgaagtggcagctgaagaatccttgaattccaaactaaagcttcttgaaatgagctaaccacaaacttaacagcatgtagtactaaccaaccaaccaacaaacaaataacaacaacaaaacacaaacaaaaagcaagcatctgagtagatccaccattacgcctcacaaagatcaagtttgttcacacgctggggcctgtggggtggagggcagggagacggagagcatcaggaaaaatagctaatgcatgatgggcttaatacctaggtgatgggttgacaggtgcagcaaaacaccatggcacatgtttacttatgtaacaaacctgtacatcctgtacatgtaccccgaaaattaaaataaaaatgaaaataaaagaccaagtttgtttaaaaaaaaaaaaagaacataagtgcattttctattaccaactcttgatcatttgaagttctctgctgggtatcagaaaaagaaggcacacacacagacttactaataaattgaaagcagcatttaggtatgcacagtccaaggttgggagtaaaatggaatttttccacatttaacatagaattacaatgagatctctgggtcagtttcattcactggttttgagaaaaagctcagtatgttaatagaagatgttgtcttgaataccttttgcttacaaagctacatttttattatgcaactcaatgtaggcaggcaattataaataatttctgatatgcaacaaaataaatgaatcccttaaacatattttaaaattcttttgagtcattgagtcaaaaaattgatatttcctcactatctaattttatgcattgtttgggatggtggatatctgatgttgggttctttgtgtactcataaatcccgagactattttctttctaaaggactttatcttatttcaagtttatcatattttaaaaacaaactggtggtactgacatataatctggtaatttagaaaattaataatgggagtcagtaatctataaaactttgtacaacaaggcctcccttaatgctctcaatgggatctcggaaattgctaccttaagcaaaaccaggtgtaacaaaatccactttaccataggctacttgaaatcacaagttcaaataacaagttcctgtgatctacttttcatcacaaaaacatcatcaaatttctaaataaagacccaaacacttctaatggtaaacactgaaacaaatgcgatccatacatatatttaagaaaaattaatttaaaaaattaacataattattttcccagttattccagctcagggttgctgtgagtggccagagcctatccccacaactcagggcacaaggcaggaaccagccctggacagggtgctgctccaacgcagggcacactgaagcacacatccacactcctcattgtggaacaatttggacacgccaatgccaattgacctggaatgcacttctttgggatgtggggggaaacccacacataaatgagaagattgtgcaaaccctgcacagacagtgaccctggtcaggaactgatttttttttctccatcaatattattataacaaaatgatgttggagaaaactgtttttggaggacctgctatattgtcctttcagaaatcacagcccattttagtacaaggcaacttcaagggctcctagtccctagaagctcttatgtctccctaccagctatctttaaagatttttgtttcccttttaaaagaactgaaataaaaagatcctgacctctggcaaggggttagcttgatagacagtgtgatacagaatattgccccaaggatgatagctgtgttagacacaattaacgccttttgctgacttgccaccccggctggacgagcccttcagcctgtggtgagaggagcagaaacgaaagctgaaactgagaaccacactggaaaatacaaactcttcttatgtagtacttactagcctacagtggcttcccagaatatgaatcactccaacttgcctaggaggtgtttccatctggctgtcattgctcagcaatcacagaagggaattgagcgtattgttgtcctgcttataaacaatctgaacacacagaaatctattactcttttatatacttgaaaccattctatggctgattggagcccatgcccaaggcaattttgtagcctatatatagcctgttaaatattaatgagagtaagggtgcgatttccacaatgggataatgggtcctgttgcacaggagggcacagaatagactcgtttcagcattttgctacactatcttcttccattaagtaatcaatagccaccaccttttaaaattaattctcccctcattatatcaataaagaaaagcagatttaggagtcgtggtttaagaaggacactggactattactttgggttttgtcagtcatctcatcactaattactcaatagctttatgccataggagtatatcaatccatgttaagacacccttaagaagaaaatctaaatatttaaaagaacatttatatttgttcattattctctagtttaaaagttagtaactaactttctcagatggttttatgatgtatagattatggcttatgacaaaaaaggactaatgtctactatgaggtctggacaatgaacacatttatgacttctgttcttgtaaagttttatgataacaaggtgaattatatggaaacaaagcttgcttcctaaataatagtacttaataaatgagaatgtgtttgaatattgataatgttgtttatataattgtaatgtattagacttagtaaatattatcttatgacagaagttcttatcaagacagagttattatataaataagcagtgtcaaaaagaagatgagcttaaataaaaatgctatatatattttagataattctttgtgtctgttgactttagatcatatttagtctttatactctacacgaatgtttccagtctttccttatgcaattagaaatgcatttgtaaaatggcacaatacctataaagggaaatttggcaatatctagcaaaattacatatacatttgccctttgtcccaagaattccatttctagatgtctttatcagcaatacatttgtatatgaattgtttacatttccatattcactgtagcacttttatattatcaaaaagctgtaaagcctaatgttcatcaagaggatactgattgaataatatatggtacatccacacaatgcaaatgtatgaagctgtaaaaaattaaatacatctttttatatgcaacagaataacctctagcatacagtgtaaggagaaaaagtaaaatggagaaaagtgcaatatattgaaatacatctaatgtcaaaattcatgagttcataaggatactaaaaagaaaaatgcatcagttacattgggaaatgttataattatattctgaaaactaacaaataaagggacaacttagacatttaatctgcctttcctgtatgaaacctatttcatcaactaaatagttcatcaactaaatagttgatgaggggaaattgttctgtatatgttcatacttcagctaatcaattaaaaatgatgaaataataagattaccattttgcaaacccctaatgcaatgttggatccaggcaatgatcatcaatggccactaaaatcacacaaaaggagataaccagaatatgtgctttgtgatggaagcattaaatacaactaatgagatattgtttataagaaagaaaggaagcaagaaagcaatcacaccaagctctgtatctagctaccacatttaaggaaaaaaagagacagaagagcatgttaaatgttaccaagaagatacagtcagtcggaaaaaatacagacaagaaaatacagagcaaaacaacccagcttcttcagcaaatcaatataaaaaaattttaagaaagagttaaagtataaactgagagacttcagaaacatattatccaagtataatccatgaatcttgtttaaatatagatcaaataaaccactataccaaaaacatcaaaagacaactgggtaaattttttaaatgactagctatttgatgttaaggaagtaatgttactctcttatatacaatttgaaataatctagcgaggagcagcaaatgtgcggctatgaggaagaaacacaattggccattcttgaatcattagctggatggtggctatatgggggtagattttactactctctaattttacatatatttaaaatgttccataataaattgttgagttatcaaaagaaatatttctatataatagctaaaattatttataaaagttagtggtctcataactttatttatttatttacttattttgagaccgagtctccctctgttatgcaggctggagtgcagtggctccatctcggctcactgcaaacttcacctcctggattgaagcgattctcctgcctcagcccccccgagtagctgggattacaggcttgcacccccacgcccagctaatttttttgtatttttagtagagacagggtttgaccgtgttagccaggctgatgttgaactcctgacctcaggcaattcgcccgccttggcctcccaaagtgctgggattacaggtgtgagctgccatgcccagccagtttcataactttaataaggaatcaatttgtttaaaaacaatcataatatggtttaggtcatggttgtttggaagtacagaaagggaacaaaataaacttgcgtttcctaaattcattttaatacatctaacttttctgatataaatatgtgcccttggattgctgttttcaagactatctgcaatcacatcgtgcagttaaccttcttccacacagtccacttggcttacccaaaaatagtacagaaccagggtcagctggggtgtttgaacacatttgtgtatgtgtgtttctatgcaatctaatgagtaatataaaagaacttaaggcgattctttttttattagtacctctccagttttgcaaaacaatcttaattattacagaatactgtttcatgatataaagctggcagtgttcttagttatcgtctagctcttctcaataaggaaactgttgaaaccagaacttgcaaaaaatttctttttaaaaaattctccactctgatatactctcccctatgccattccattacagaatctagatcctgtcttcttcccaagaggcttgctttctgagcagaataaaaattacggcaaagttagtttgatagaaagaatgaaactaactcggtttcctagaatactgaccagcctgcatttatgaacatgaatgaaaattacagggtctctatgtagaaatctgaatcaaacttgtgatcaaaaccagaagaacttgaccctcattttctttcttagccaaccactaactttgggagtcttcagatgaaatctcatctccagcatgacttaatatttgggtaaggtgctggtggaaaagtttcacagtctatttcaaagaaaagatttgcatttgtgaggcacacatctgcagtactttgaaatatactggcaaattaaaaattacacacactctcccaacaagttctcagctcttttaaatattgcacaaagaacgttggttagtaatgtactcaaagatcagaattctgtttcagcacatccttatatgaatattctactataataaaagctgaatctcaataagcttgtcagcctttatccaaagacactcgaggatttaattgttctaactaactcgggtactcagatcttttgaagaggtgaaacaaatttaactctcttaaaataatcagttagaattgcctcagtgtcacgtggtaccagtggaatacacttctgtggggtgtcaggaaactgacggctaaaagacaactagagctgtaaagcctcgtcttcgacactcacgttttatccagggataaaggcaacccaaagctcaaacatataccaatgctttaaatattttcaacgtacatctggactctaagaacaaaagctggtctattctatctctctggttcagtaacttttctatcaactgcaaaatagcttcaagaagtgcagattctgattccaccacggttttacaatgttttgtcaaaatttccatgctaaagatttgctttcagaagttgctgtgacactagaaatgctttctgcaaattgaaaccatctccaagattacctgaaggaaagaaactagaactaaaaaaaaaaaaaaaaaaaaaaatgcagaatgatccataacctctaaaagtggttattcataccagcttattttatgcaacaagtctgatgagtaaaaaagacccaaatgtacaacaatatctcattcttattatttacattgtatccatagactgtaagtcatgctacacttctgggaaatgaatagaaattatgatattctattttacttgaaaggagttcttaaataatattttgatatgttttaaatattaaaattaaataatactgttacatgttttaaatattgctttttcaggtagaaagcataagatggccgaagaattggtataatcaattctttaaaaaactattaaaaaggaaatgaaaagctttagaaaatgtgcccatgatgacactatcgtgaactgctcaatttgttttccctattgtgaaacttctgcttggcctactcactcctataaaattatgttattgtgcactttctattccttctttctcttcttctctaactaataagcccataaataagtaccactaaaataaatactaaaataaataaatggtacttcttggtcctcctggaattctttcattatgccaacacttccttaaaattctcaagaatttccccagggaacccagttttatgcctgccccagcccataaggcaccctctgcctgcctctgggctgcaaggcagatgtactaaaaaaaggctctgtgcttatgtcctgctcccctgaggatctgttttggcccaacctctgaaactttaccagccccattggaaaatggtatttgctcattgctgtctttggagagtttggacacttaatgtaaaatgtaacacaccacaaatgcacattctcccagcctgtacatatgtccaattatttctccaaactttattgaaggtatttttttcattacttttactcaagtgtgtgctaattcctgaaccaatgcaacaactttcagattatttgtccccaaattcttgcccctctaatcatctaaagtaccatgtctcatcatctcattcttctttccaaaatgtaaagcttgctccacattgccatgaccgttaccgagagctttccatctgccaaactccatgccatgctatttatccgtaattatttcattagataaacacaatccccctctgagttaggcattaacttctccaattcacagatgatgagaactgaggctcagagtgtttaaatagtttttcctcagtcaacaaaataaagctcatactcagcattcagtgcatgtgtgattctgtatggtaatgggtaatgctagtcaatctgatttagcagaatttctaacacttcttgctggccactgtggacgaactcatttatatctctaagcttttgctcctactgttttttattcaaggaatattggtcttcttttattccacctactcaaacccagcccattcttcgagggcaggattaagtctcacctcccttaggaaacccttttccgatgccatttagtgaacgttttagtgcatattgattgctgttattacatgctgtatctccaatggataaaaatcctacagtcgtgagacttgggcaaaaccatggcaaatgacagatcccacattactcttcaagttaaatgtcaaaaatcttacatctcacagttacacaaaaataaattagaacttaatcatgttgcaactaatgacaataatttgttgatgtttaaagaccataagggtttgcatcatgtaatttaacataaatacactaagtggcttctatggctcaacttagtactcagagtaagggctgtcggtatgaataaataagaatcaaccgtgagagaaatgtatactatattagtaccatggaccaaatcattccaaaccataagagctaaatagaatcctgttcaaatgaaagatacacaaatatagaatcaattcctataagcaggttatattcatatacaaaataaaagaagttaaaatgtatagtagatgtcaacttggaaatctgcattcattcatttacaaatactcatttgtattgactacttagtacctgaaaggcattttatgtgtctatgcctatacctacttaatttatagtttgtctacagaatgatacactaaaataatcacagattttgggagtaaaattagctggaatcaatataatttgaattcacttaaccattttcaaaaattagtagatttgtataattgttaaacaagaggctctttagaaataatcaccaaatctggccgggcgcagtggctcacgcctgcaatcccagcactttgggaggccaaggcaggcggatcacgaggtcaggagatccagaccaccctggctaatacggtgaaaccccatccctactaaaaatacaaaaaaattagccgggcgtggtggcgggtgcctgtagtcccagctacttgggaggctgaggcaggagaatggcgtgaacctgggaggcggagcttgcagtgagccgagattgagccaatgcgctccagcctgggcaacagagcgagactccgtctcaaaaaaaaaaaaaaaaaaaagaaagaaataatcaccaaatccgaagattgtgattgctaaagttatgataagtaagaaaggtagtggaacatatgctatgtataagatggatcactggatgataaaaaatgtgtctagtatctaatataattctctcccaaactttcataggagagaaataaatactgtctctagtaaacataatcatttaggtcactataaaaatattttttatttgttatagggatatttcactgggatttttcattgtctggatgaactatctcttgaaactaaaactgacaaaaagttttcaactcatgcaccagcatggatagttggtcgatgtttcatgaagagctgtgttgagaagcgttctaaagccattttcagagttaaaaagtcatgattaactgtgtccacagtggttacagaagatagtgggtgtttaggggaagaagagaggaactgcatttgccacctctactcaaattatttccctgagcaaattttgcattactaattttgttatctaggtaccttgatacagggagggcaattcaaaagatggatgactgaaattttcaatttacaaaaaatatacattattcttccataagtttggaaattaactgtcttttctatgcatattttatttttctatttattatagaatattaaataatattttaactagtcacatcattttcaactattttaattctataactaaacaaaaacaaataattctacaaataaataattctgcctaaataatactgctgtataggatatggcaaatagacaaaaggtaatattgaagatgatggtttaaaaaagcaactattagttaagagaagaataacttcgaatattgatctcaatagaccttactacattaaccataaacttaaataccaaatttattctggtttttgtaataagtgactgatttttctatttgttgtactgttaataagatttatcatatgtattttgtatagtgtcattaatctaaaagacaaactattaaaagtataaaagagaaattatgtctattcaattttatcatcaaaggagttaaaaaagaaaacccaagagtaacattattagctaagttaaattgagcaatttctttcaggatcttagatgtaagcttttttttttcttttcaataatcagagagaggaaatctcaaaaattttttattatctaacatgatggaagaatgtgcagtacttttaagccccaaaacttttaaacatacgtgataattgagtatgctaacaaaactttagtttcctgaaatatttcctaacagtttacccatctcatctttacactagtaaattccagtcactccagattttaaaataaaataaaattatcaccaagaggcaaacatttatagtactcattactttgaaattatggttaaataaagatgtaaaaattaagttgggaaaacaaaatccttttaaccaaatttcctatcaaattatctggaacaaaaactcccttttacttccattagtcttaaaagtcctctgcattcacttggcctctgggtacacagtaacctttctaaaggtctgcccaagggatattttagtcattctgtgatctccttgaacacaagtaatgacaaacaataagctaattctcaaaaagtttttttttgagtcatttttactacttttaaatgagtgtgtctgatgcatgattttgggccccctgattaatggtcaccgccagcccagcttctggagttgtaatgtttccgtgagcttccctccagcagagctcgaccattaatccagtggcatatgtcagctcagcagagcaaggtcactcttctgtttcaaggggaacctttttagaaataataaaactgacagaaagttcttttttgcatgctttatgccacctgaggttgagtgctgcagttaatatcataaagcttataaacattcccatcccaggaagcacccactgctgctggtcttaggaatttaaacactttttttcttagtaagaacagacatgtttatgtgggggcaaatatatggtatgtcatcccaaatagaggaagaatgggtgggaaaataaaacagtaagttcatgttaggaagtttggaagagatgttagtgtcctataactatttttattgtcaattacatttatttaccttttagaaaactgggatttggttagatgaatacttcaatctcctgagggggttaatagcagagttgaaatataagagtagtggtaaaaagaaactcagtttataatcactccttgacctataatgtaatgttcaataattgtagaacatttatctttgaaggaactgtatttttaaagttataaacatttgttttattggtaatgactttttcataattgataattaaatacagtgagatagtcataatcttaaagtaatttgaaatttttagatgtcctaacatacaaatcaaacaaaagataaaagatgattgctatgtaataacttacaatataaagaaactataatcataagtattacaaaatgtacatatttaatattttattacttttattatttatttatttatttatttattgagacagggtctcttgctccagggttgccaagactggagtgcggtgatgtgatcatagctcactgtaaccttgaactcctaggctccagcaatctcctgcttcagcttcttgagtagctgggactacacatgtgcaccaccatgctcagctaacttttattttttttattttttgtagagacaaagtctcactatgttgcccaggctggtcttgaactcctgtcaagcaatcctcccacttcagcctcccaaagcattgggattacaggtgtgagccaccatgcccagccactcttatttaattaaaaatagcagtagcataactgtaaccacgtaaagtattcaggggaaaaaaaaccccagaaaattccaatttgctctttttaaccaaatactgagacgaatgccatatcactatgtagattttgatacaaggtaaatttgacttgactcttactccaggagtttaagctgttaaaactataaaaaatataataaagaaacttagttatttaattgtattcattttccttttgtagagaaaatgtacctggaagtgaagccagttagcaacttagctcaatccttttaggaagacaatacattggtcaagtatcacgtctctatgtccagggtcacgccctcacctcaacaagtatgggaactttatttttaagcttgcagaaatatacaacttcaaggtgactaattcataaaccaaactgataagatatcaaaaatggcaatactaaccaagcgagcattgatttgctgtgggaaattcatctgccaagaaaaatgcatattcatgttgactgatcaaaaaattgtttcccctgaaagaaaccctacacaggacaccagatcattgctggaagtttgcttgattcatgtggtggtcaaagtaaagtcaattaagtggtattaagactagagacatgaagttcttctcctagccttaggtacacatctcacctaagagaagtctgtccagccaaaagggatttttgcttcagctgttttgcatgatttgcagacacagtggcaaatttctactctcccacctatttctaggctgtctgcaaagcaacacccttttgctaatactttttgtctttaaggcagattacattacaatgtgtgattattttgattctaggaatggttactttgttttgttgtgggtgttacccagatctttatcagtgacgcatttacaaactatcttctggagtagactacttctgcagatgactaatattatccattagtcatttcacactcattatacatatattgagaaatcactactatgttctatactatcaatgttttcagtggtggccaaagtgttataaaaagcacacggaatctgaaagtcaggtagaccgagttcaatccctcttgaatcctcaacaaaaatcccagggatgcaaatatgagtcagctacatcccctgatcctctgttcttgatggtgaatctagttgggagcacatactgaaaaactgtgagtttaaacaacaacaacaacaacaacaaacagagaaatgtggaacaagcacaacgaaaatagaaaggagggagagactttttttctttttttttttgagacggagtctcgctgtcgcccaggctggagtgcagtggcgctgtctcggctcactgcaagctccgcctcccgggttcacgccattctcctgcctcagcctcccaagtagctgggattacaggtgcccgccaccagaaggagagattattaaatggacatgtactaccagctaggaagcatacatatggtaattttcttaattctcacatcaaccctatgtgacatgctttaagactttcccttttcatgattaccacaatgaggctcaacaggcttaagaaaatgttcaaagtcccctggttaagaaagatcaaagtaagacattcacactcaggtctctatgcctttagttcacgttacctactgctctgctagactgaccctaatacactaccctggggtaactgatggaggctttcttgaggaagtgacagtccacctataaattcgaatagataagaattcatgagttggaaaaaaagcacagagcattttaggctaagagaagcacagacagaaatgtatgagagtggtcagatcatcaggaacacgggcctcactccaccaaccaaaccagaagatctggtattagggcccagacataggtatttttataaaacaccccagatgattttaatattaggttggtgcaaaagtaatcatgatttttgctattatttttaatatgcagccagaaagcatgggtcaagggggtcaaatagatgttttactttttagttttcaaatgattcctaatagaggtctagtgggttgtggcagagttacatttggatgtgaggaaggaaagaataacaaagactggagagtgtaggtaaaggcagtcaagtcaaatgtggggctggcagcatgaagggattggtcaactggaagtggagaaagatctagagtaattggaaggaaggaaacaactaaaaacctaatcctcacttccaattagtacaagctcatggactatgttatgagctgaattgactcccacaaattcgtatgtttgaagccctaacaccttgtacctcagaccatgactgtatttggatataaagcctttaaagagaaaatcaagtaaaaaatgtgaccattagggtaggacctaatccgttcctactggtgtccttataagatgatgtttggacacacagagagagacatcaggagcacacagacacagatgaagaggcaataaaagggcagccatctacatgtcaaaaagaaaggcccagaacagatccttccttgaaagctctctgtgaaacccaccctgccagcaccttgatcttgggtttccaacctccagaagtgtgagaaagtggattcctgttgttaaagctactcagactctgatattttgttatggcagctctagcaaactaatacagactaagtgaaggaaggagggggacttagccagctgtggtgacaaatggctctctctatctatgcaagaatcacttcatctaccaacagagatagtttaaaatcttctgctattagtaatcaattcttaatggaggacatttttgttttctactaagaagctaatatgaatgtcttgtttctgaaagttcatcgaaatctttaacactagaaaggaggagaaatggatcagtttggtaatgataaatttggaaacggatatgtaaagcatggacttgattccattattgtaaaaacaaacaaacaaaaaaaaacacagttttcagggattttgaaactatttatctccaaagcaaggcaaagaaagactaaagagataagtgtgtgactaaattgatttttaacaaatccagcatcttggtagtcaaggtagtgaccttataaagcttcctataaaatacaatatccaaatttccaaacaaaggggaggctacacttctgtcatttctctagctattcatctgatctttctgaatattatctgaacacttttcaagtatagctaatacatttggccccaaacattttgctacctgcttgggataaaacttgattacagattcatattctgtaaaacggaaaagctaaaatgtattagtgctttgtttggagagaagtggtcaaggctaaaaattatttaaaaggtgcactacgaattaaaataaaatccaatggaaaattatatgtttaagaaagaagaagaagaagcctttgcaaagtgagacatcaatttaggggtgaatttctggtgactgtaaacaatggaatgaggccatttctccttggcatgcaagcaccaactggaagcaagaatgggaccggacagtggaaactttctgtctgccatctttagacagcatgtagtaagttacctataaacatccaaatggataaagtaagtacaaatatatcccaaatttagagtcttctcaacaccaaagtcaactgggccgttcctttgtctgaaccacagttatcccttgcctggtttctgcaatagtctgttaactggtctcactcccttcagtatatttgaaacacaaaagccaaaataaacccactaaactgtaggccagattctgtcacttctcaaacatctttcaacactagctaaaattattttaatggcctagaacgccttcagtgatccagctctttgcggcggctcttcccgctatgcactctgccccactgcttctcaaacacaccagagacagtcccatttcaaggcctttgcacttgctcttccctctgcccagagtacagtttccttcaccaatcccaagaccagctccttcactttcttccagtcctttttccaatgtcccattctcaccaaggcttctctagttcttcatatttcaaatccttcttttctgttaatttttttttcttcttggcacctatcattatctagcatactgtatatattacttatttatcctatttattgtctgtcatctccagcaaatatggtatcttttgttcaccttggtatcgccagtgtattgtccataataagcatttaatagacatttgttgcgttgaaggataaatgaatgaacgaatgcatggattagtgaattaacttttaagtcttttgaaaagtagaaaaaagtgctgccaggttggaaaactttaaaaattcttgatgtccagtcacattttatattaggtaaataagaatatttggggatggaacccaatcatcagttttttttttaaagctctttagtgattcaaatattcggcctaggctccaaaaaccatcaacctagagcatcatttccaaattataaagtgctcacagaactgctgagtatcttgttaaaatgtatgttttcatttcgtaggcctgggggagactggaaaatgcacatggctaacaagctcctggaatgcccgtgctgttgctctataggaccacagtgagtagcaagttcttagattcaagtcagccttgatgaaccttgagatacattttaacatgttctagacttcattttctcctgacttgtcttatttggttttatgtttgcattatagtttatcaaaaatactttttaaaatgctataaatgctacataaacacaaaaatgaagacaaccttttgagatatctggttttttgttttgttttgtttttggagcggacggaggtaataactagaagttaaaataaatatttacttatagccaccgttttttaaaggggaaaagagtaaatctaacatattacctacattttatatcatgtattttattccagaaaactctgtttgaaaaggcaaacattcaacaaaaattgtaccccagatgaagaagtaatagagagtaggaggagagagacacaggcttagaagcagaaaaactgtgccataaatcccaaatcttttaacttgtggaaaatttttgcatctacagggcttttttcttctttgtaaattggagataaaaataatgtctacctcctggggttttgagaagattaaacataataatggacatgagcaccttggacaagtacctggcctcaagtaagcaccagtgcatataaatacttattctctttcttatacctggttagataagagttaaaaatgtatcctagcagtcttgatacaaaaaaacagtgaagaaagctctttaatggtacaactatgtgtcatccttgtctaggagcataaatttgcacagcaggcagtgcagtgaaaacagctcataatcaactcatcacctctcatcattgctaggatcaaatgcaaatgggaaagaatgccacttcagtcattgctagtgaaaattagcatctgtgacactaatggtgtctcatttagtatgcactttagattaaaaagaatggttaaaaaaaaggctatttccagaactgtcattattctaacgtttccctcaaaaataacaatggtacttgaatctcctttactcaaagaaaaacctgctaaaatttattaacacggatcattaatccctctcaagtaaaggccaagatgttctaattacagtcactaactttaatttgtgggatccatgtctttctattttcaaaatttcttccatattctttaacctggaccaagttctacctttaggtaacaatgggattctttcataacattgggtatattagagttcttaacataaagcttaaaatgagttacagttgtactgatacacaaacatttttacacacatattaacagacttgctacaaagaaacaataagacagggatgccctctctcaccactcctattcaacatagtgttggaagttctggccagcgcaatcaggcaggagaaagaaataaagggtattcaattaagaaaagaggaagtcaaattgcctctgtttgcagatgacatgattgtatatctagaaaaccccattatctcagcccaaaatctccttaagctgataggcaacttcagtaaagtctcaggatacaaaatcagtgtgcgaaaatcacaagcattcttacacaccaataacagacaaacagagagccaaatcatgattgaactcccattcacaattgcttcaaagagaataaaataaataggaatccaacttacaagggatgtgaaggacctcttcaaggagaactacaaaccattgctcaatgaaataaaagaagatacaaacaaatggaagaacattccatgctcatgggtgggaagaatcaatatcgtgaaaatggccacactgcccaaggtaatttatagattcaatgccatacccatcaagctaccaatgacttactccacagaatcggaaaaaactactttgaagttcatatgcaaccaaaaaagagcccgcatcgccaagtcaatcctaagccagaagaacaaagctggaggcatcacgctacctgacttcaaactatactacaagactacagtaacaaaacagcatggtattggtaccaaaacagagatatagaccaatggaacagaacagagccctcagaaataatgccacatatctacaactatctgatctttgacaaacctgagaaaacaagcaatggggaaaggattccctatttaataaatggtgctgggaaaactggttagccatatgtagaaagctgaaactggatcccttccttacaccttatacaaaaattacttcaagatggattaaagacttacatgttagacctaaaaccataaaaatcctagaagaaaacctaggcattaccattcaggacataggcatgggcaaggacttcatgtctaaaacaccaaaagcaatggcaacaaaagccaaaattgacaaatgggatctaattgaactaaagagcttctgcacagcaaaagaaactaccatcagaatgaacaggcaacctacagaatgggagaaaatttttgcaatctactcatctgacaaagcgctaatatccagaatctacagtgaactccaacaaatatacaagaaaaaaacaaacaaccccatcaaaaagtgaacaaaggacacttctcaaaagaagacatttatgcagccaaaagacacatgaaaaaatgctcatcatcactggccatcagagaaatgcaaatcaaaaccacaatgagataccatctcacaccagttagaatggcgatcattaaaaagtcaggaaacaacaggtgctggagaggatgtggagaaataggaacacatttacactgttggtgggactgtaaactagttcaaccattgtggaagactatgtggcgattcctcaaggatctagaactagtaattccatttgagccagccatcccattgctgggtatatacccaaaggattataaatcatgctgctataaagacacatgcacatgtatgtttattgtggcactgttcacaatagcaaagacttggaaccaacccaaatgtccatcaatgatagactggattaagaaaatgtggcacatacaccatggaataccatgcagccataaaaaatgatgagttcatgtcctttgtagggacatggatgaagctggaaaccatcattctgagcaaactattgcaaggacggaaaaccaaacaccgcatgttctcactcatcagtgggaattgaacaatgggaacatctggacacagggcagggaacatcacacaccagggcctgttgtggggttgggggaggggggagggatagcattaagagaaatacctaatgtaaatgacgagttaatggttgcagctcaccaacatggcacatgtatacatatgtaacaaacctgcacatgtaccctagaacttaaagtataataatggaaaaataaacaaagaaacaaagacagataaaacaaacaaaatcctgtaaaaaaaaaaaaaaagtacatagcttgagtgagtatccatacttgaaccaggctgtatgtagtagaccaagggtgtattaccctgtagcccatgatggctttgaatgtggccttgacggctttgcatgtggccccacacaaattcataaactttcttaaaatattatgagatttgtttgtgattttttgtggttttttttgtttgtttgtttgtttttagctcataaattatacttcgtgttaatgtattttatatgtggtccaagaaaattcttcttcttccagtgtggcccaggaaggccaaaagattagacacccctagagtagactgaagaaacttcattcactttacaaatatttattgagagtctactacgttgaaagtattatgctagctgcagagggaggatatgtggtgcttacttcaatattaggtcattttttaaaatatttgaatattaagaaagttgttagcctggacaatctagcaaaacccccatgtctacaaaacatataaatactagctgagcatggtggtgcaggactgtgattccagcgactcgggaggctgaggcaggagagtcacataagctcaggcatgctgacgctgcagtgagtggtgattgtgcctgcactcaagcctgggtaacagaatgagaccctgaaaaaaaaaaaaggaaggaaggaaggagaaagaaggaacgaacggaaaagaaagaaagtttttttacaattgtaggtgttgacatgtgtgtggacgcctagagagatttctttgatgaacttcctgcatagtcagagacaggaatgacgatttctaaacttacagacgctcttacagacatggtttccctgatctccataaactttagctggcaattcaggtggaaacagaaataatatctacagtcctgttgcttataaaggcagtatattaagaacagaagtattggaaattaacatatttcatgtcagtttcatttttcatctaactctgtgtcttcttcaaggtaattgaccttccttatgccttaggctctacatatgaggctaaataagagtcattctctcacagttgttacaaatattaaataaattagtgtacaaaaagctgtaagcacagcaactgacatgaaaataaaccaatgataaatatagaaaaataaaatattttagttggaaaaacagacaaggaaaattgttatgttctataatttaagcatttatagagtgtaatgcaataacatctcatcaaatctgaatattgtatatgcttaaaagtttttaaaatcactatcagtaatggacactagtagtaagaggtaaaacagccagttgtggttgctcatgcctgtaatcccagcactttggaaggctgaggtggtttgagatgggaagatcacttgaacataggagtttgagaccagcctgagcaacataaggagacctcatctctataaaaaattaaaaattagctgggctggtggcatggtgcctgtggtcccagctactcaggaggctgagatgggaggtagcttgagtccacccaggaggttagggttagggttagggttatgtgattgcaccacatcaactccagcctgggtgacagagcaagactctgtttccaaggtaaaggcaaaattcaagaataaagataacagtaccttgcatgtatgttaagcaagcctatttttaactaacctaagtacagaatacttaactattattctcctatttcttttctaatttggaatttatctgtatacagtagagagttctgagacacacattaaagcccttagaagttattaacattccagtacatgcaatgggtttcttttgtaataattctgcaagaatttaccagtttctgttatagaatatctctggtctctgcctctcagcctatactgtaagtgtcttacaataaatttgaatgctactcttaattttgagctattcaaaggagagaacctatactaaaaatagagaaagagagaaataaaggatgaaaaagagggtacactaatgataacactacacatggtaaaactgtattttaacatgtatttggacttactctttttaaattcatgaacatgtttatcgataagttttaggaatataagaaaataatgaattatttttgatataggactgaaaatctattgctacatattatataaatgaatgttttgaaccttctcataactgtaagacctatttgaaaatactaataacaaaatctttctccattagctttcaattggaaagtttgatcatttttaattgaggtaacattagttataatatgcattgcatttgaattgtccaataggtcacttgaaatagaaccaatgacagttaacaaaagctaaatgattaaatattttcttcattttttatattgtcagtttttaccctactataggatttacaatttaaaaaaaaaccacaaaaacaagaaaattcctttcacaaattctaagagtatagtatgaagagtttatgtttcttggttaggaaattttgtaaactaatatctggtatgtagttaatcagtgaagacagtgattccctatatttcagaccaatttcttgatggttctgtttctaaacatagaccctttctagacacaatttctcttcagtaaatgaaaggatttgcactcctttttctatgagccttttatttgtagggattatcacagcatccacctctgccaattttttttctttttgagaaagggtcttgctctgttgcccaggctggagtgcagtggcacgaacacggcccactgtagccttcaatctcctggtctcaagcaatcttcctgcctcagcctcctgaatagctggtactacatgcacgtgccaccatgcccaggtaatttttgaattttttgtagagatggggttttgccacattgcccagactgggctggaactcctgaactcaagtgatttacgcacctcggccctgcaaagtgctggaactacaggtgtgagcccatgcacctggacagatactgctctttattcatataatatgcaaagaaaattacccaccaaaataaatgtgaattatgaggaaaggagttattttaagacataattacaaatggaaaaatatcacttccatgttaaaaggaaacaatccaactgaatgtatgaaaaacatgcctgtgcctctatattcacatctctttaaattcatgcagaatgaaaccatctgtctaatgaaaataagaattcattcacaacaaaacttagcatttccaatgtgaccattttctgtgatatgttttgttcaaagatgtatattttttcaaaattttttttattttatgaataaggaagtcaagattaacaatattccaagtgtattataatagttactgctcttaagccaaatgatgatgatggagtaaagtatcattttgacaatagtttaatgttgtaaatatgactctaactcactataaaatacaggctttattaaatactctctctttagattttaaatactttgaggtatatcattctccatattaacttttatgatcttccctaaacctactattgttaactatttgttgtacttaatcaagtaaatatcatataaaattaatcttaaatggaagcacaagccatgcttttaaaaacttttctgtattatttggaaaatgttactttgagtttttcttatattagggaaaaagaaatcatgatacgttatctagctacattttaaactaaagatgcttgtctatccattattatgcatatgtgtcagaaagaattaatattcaaaatcatttattctcagtttccaaagataagaaatcatttatttttgtttccttcagaaaaacttggatggtaacttccaaagagtttcaaaatattgaccattgttcaatgtctcatcaattcaaaaggtcataacaaatgaaataaaccaatctctttctctgaaaatgggtgcctaacatataaagactgatagacaataaatcaatccttaaaaaaaatctggactcagctattgtttatctcagaaagagactaaaaattgtatttacctgagaaaagaaatgtacaagtattggagaaattttctgacattggtactttgtaaatagttgttttacgttattaataaatctagagttctacaatagaatttgaactttatcccatgttatactttttttttttaaaagtagcacttattgccaagacaaagaacagagtaacattccacatattaccaatttgtcaagtctaccagtatatggtgttttgatgcttctcaaaacacagcccgattttttgtgtagtaataacattagttcgagagaatagcaaatatacatctttacaacgagctatcatgatttaacattcaaaaatgagaaaagtcttatatttaaccataacatttccattttacaaccttcttataactctattttgaagagctaattacttaagagataaaattcattcagtagactgttcaatagacgttgacaatctcatagtcattaaaaacatgcaagaagattttataataacaaacactcagagaccactaaattgattttcttgaagttgaactgaactcaaacttcacttacagatgtaaatgttccaatatgcaccataagacaaaattacagagacaataattgctaggtgtgatttaaaatctaactttgcaatttaatttttccgtatttgccatgaggcattaaaccctatgtttgacttatgactgacagatgagaacattgtatgtgttcaaacacacatatgtgtttattttctattaaatagtttgattttatttaactatgtatgaaatcaccttacctttggtttttgatgtttctccttctctgaaacattggatggctttctcttgagcattttgaattctgactactcctagtgagtgcactttctgctgttacagaaacaactgaaaacagtcagcagtgtgctgtctaatgcacagcatcagataaggttgagcccagggacctgccacttcctccttcagtcaggatatgacttcaacatttacatgggtaatttttttttcttacagtaattctttggtaactctttattgtcttgctattttctatgaggtatgttccaaatctcatatttagacatgcctgcagttatgagagccataaggatttcaaaacaaaactcattttcttggtttatataaaagtaaaaatttacaatgcattccatgggtagaaaaaagaaaaaatcggagccaataactgaaataaaacttgagatgttggttttctattatttaaaaaaaaaaaaaagaatactcaaggtagtcaattttgtatatattttttctttttttgatacggaatctcactctgtcacccaggctagagtgcagtggcatgatctcggctcactgcaacctccacctcccgggttcaagcgactctcctgcctcagcctcccaagtagctgaaattacaggtgtgtgccaccatgcctggctaattttttgtatttttagtagagatggggtttcaccatgttagccaagatggtctcgatctcctgatctcgtgatccgcccacctcagcctcccaaaatgctaggattacaggcatggtatatttctaaataaacacagttagaagataaaataaataaacaatgttagaagataaaataagttagaacttaaacaatactaatcctacttaaagcatgtatgcatatattttaaaatatggattagacccattctaaatataaatgggaacatgactaaaagtaaatgtttatcatatgttacttttctaatgtattaagatgttgtaaagttctggttaacaaagagatcaattaaacagaacccccaattaaccatatgtctttgtgctacaaacgatgccatatactgataattgctgccctggtgatgagccaatggatcaacggtttcttcaaataaaacacccagaacctctatttaatagtcctggtagagctaatatgacttattaagagtttccccatggtttaaaaatgtttatgataatgaaaaaagcaaaatacccagaagtaaaagcaaaaagttcaagctttattgttaaatggggatttaccaaagggagatttgcaaaatatatgaaactctggttccatttgagcaacccagattaagaaaataaacctagatttctgtttataaatcctctgaattgaaaagtgtagtgccatattcttaatcagcagcttttccacgtgacaaatcaactgactctatttctcaaacttccctcacacttctaagctccaccccaaggcccaaattttactaattcatttaacaaatgagattcaaatttcactaatttatttaataaatattaaattgattgtctattatgtgcaatttgacaatatttcaaacctcttgactagctaaaaacaacctgtttttgttctataacagaattgaaagaatatacttttcatgattatggttaatatgcctattattttattaccagataataaaagcagactttgatttttgagaattattgagttagtgttttcaaaatactgacacagacagagaacactggaaaacctgagaatgttgaggtggggtaattccccagaaatacatcttttagactttcagtttgggcttgggttaagaaagttggctaggcagatcttttgcttcatctcttaagaaattgaaagtcataaaaatacgtttttaagtgaaccatttgcaccctcgacaccctcttttcttcatctatgaataaaaatttaattatggagttcaatcagtaataaaatggcaatgataatgcttgcacttagtacatggtagagttttgttgatagtaaaatgaaataccaataaaggacatacttattagatgattcatcatttcagtaatgttttatgtcaaaaaatgtttgtgaactctaaaaaggcatgaagtttcagtttgaggtggtgcttgctataggttacatttctccaatgtttctataatacagtgctaaagaatagagaacagtcacatttatgagacccatatctggactagatgcagtttttaaaagcgttatactcaagcaaacaaaaaatatatatccatttatggatctctaggcacttcaccatctttaacattacaagaaatgtttaaaatgtaaacaaaataaatattttccttcaagtacgggtggaaaaggatttttccaatctttctttcactcaagaaaaatgttttctggggcttaaaagacagatgtgacatttgaggtcccattcattatctaactatgttaaacttcttgatccccaaaaagatcaagtgacaaggttacaaatgtttttatcaattatctactattttatggtatttggaggacaccgagatatttagtgagtgacacagagtgacccagcaagctcaaaagtcacagatggacagaacaagaatgaagcagagagtcagtacagagcacacctcactactgaccatgattaaaccactagcaaccctgttgcttaacatgtattctgaaatagggaaattgcaaaagcacagtcttggtgctttacaataccttaatggtcttacatcccagacagaatggaactttgtgtactatctctgtgtcatgaatcatgagtaaaaattttgaagaaattgcagtcaaatgacaaagattgaggtgtatttttcgggaaagtaaggtgagccataaaaggattggttcagcaatccaacaaatatttatttagtgtattgctaaaacacaaatcataaaattcaaagcatagatagaaggaaattagagatcatgggacattcaaagtgatgtcctcgattctgagacattgaggatctccatctacatctctctgccttctgccatcaggttgaagaatacaattagatagtagtttggattaatcctactctacattttattttaggacatgtacactggttcaatggatgaagggttttaaaatcaaatcttttagaatgaaagtagattctctgcattgctctaatagttaaaacttctctaacatgaagagttggttgggcacaatcttatgcatgcctctgtgtattgctgggtcaaccatgaccaagggatattttattaactctaaccaaaaatactcctgactatacctcaagtgttttgttacaggaggaaaacagagagaccaatttcaagaatttgaaaataagcaaaataaggttgtcatcacagaacccaactctgaaattaagatttaatgtaagaataatcattttatagaaaaaagaactgtattccattcaaacctgcagaatttactcatctatgattaagaaaaggagtcaatcataaaagtaacttaaccttgataattcctctcttctttttggccccctcagagtagacttctttctatagtacagggaagagaattttattcaaagaagttgagtggggatattgtgttcctacctgtttggggtttcacggaagtggagatcctacaatatcaaaaaaaaaaactctttctttctcagtgtttcctgaaataagtacacattgccatctgatgacgttctctgcaattctgtatttaataattcagatgttggtgccaagctatatagaggggccttggtgttgtaccctcctctagttatctagcttattcttaccataggtggattaaacatctcaacacctccttgtttggatttgggagtttaagagaaatgacgggatggatattccccctggcctatgggaggagttaaggaagtggggggaccgtttcttccttgtgaatctcctatatttcctaactctctaaagtcacttacccattctatgtctggagttcctgtttactaattcctttctctaagggacccagccctacccagctcttgaaatcccttctaatgtgttactaattgaaaagctgtgcagtgacttttctgcttctcctggtgacctgctccaggaagtgacaagctcatgttttggggagattaggggaagataaaattctgattctattaacaggaagtggcaagaagatgggagctactgaggtttgccatttccaacaagacgtgaaatcaagcatatctatcaccaggattaatttcttctaaaaacggacctgaagtctacatgataaattaatattccacctgttgacttctccttataagaccctgcctgagtttcattgcctgagttcccatacattcaactaacaaggatgaggtgatgcccaaacaacttctaaataattaggaaggttagggagaatctaaattcattttacctcaaatagaaaaaagacagtaacacagacaaatactggaaggttcctttcaagttgctgagttaaaggaaaagagagcttagtgagctttgagtatcttaattctccagacaagataatctattgcatggagatgaacatatcatgcaaattttagctggatttcagtaaacaaaatatgtgtttaactattttcctttgtttttattttaagctctatgcataaatgatgatttggctccttgggtagatatgtctataggagacaaaggcagcattcatatggacatcaagtacctggaatctgagattgctatttctcattacaaatttaaatactgccaaagtggttaactagaatgtattgacagaaaaggatctacccttgatgtgctcaaaatactatgtttctgagtggttagagttgctagtcatactctggatatcttgggaagcctcttagagagcctggcctggcaaaattactgcttattttaaatttccaaagagataatgtaacacattatcttgttatctcagttatagaagaaacagatcattgggataaatagaagggaccaatggcctaagatgaatggtgaacctaaagaatcatacaggataaaactgccttgaagagacaaagaacttcataaattacatctatgccttacaagatgtttgaatgtaagagaagactgggtaccaagaatgagtagtatcagttcaaagtgactggaaaaattagggaggctgataaagtttaagattcaaaataaatgcaaattactcagattacttcaataaattataagtatttcctttctaagtggttttaaagtcatataagggccatattgtggttggcataacaaataatgataaaatttaatccatttatgattaaaagttgtaattttcatgaagtaatattattctacaagttaataatattaataataatgactgtcatcttgagtgtttattacataacagaaattatgctgtgtgctttataaatattttcaatataatcttcacaaaaatcttcatgagctggtactaatattatcattctcagcttcctggtggggtttggtaacgtgtctagtttgcacagctaggaagtggtggagtcaggattcaatccaaagcctcagctcataaccatcactctatgtcataagtaggtcttggcatacctaaatacctggcataaaatgggaatgattaatttgactgttcgggtcaggaatgctaagggctagggggagggtaatgttgagttgctggcttctggttgaaaagagagttggttcaatcattacatgtgtaaaaaaatttgaaaccagtaaatctgcagccaatccagagctcttttctataattaagattcagtatcatggggacaaatctgcatttcaggcccctctccaacccaagctaccttgttgagacacttattggccctcaattctacccttgataataatcattgtctctaattttatgcttacaaaaatgggtgtaggtaatcagagtagaagcacaaatgagacttatgcacactttatgaaattcctttctatgaagttccttggtctgaatgtttgtgtggtcccaaaattcatatgttggaattctcacccgcaaggtggaaggtaatagtaggtagggcttttgggagaattaggtcatggggacagagcctttatggattgcattagtgcccttataaaagaggctagagagacatcccttcactcccacttttccaccatgtgaagacatagcaagaaggtgccatctatgacccaggaaacaggccctcaccagaagagaaatttgctggtgtcttcatcatggacttcccagcctctaaactgtgagaaatgaatttctgttgtttggaagctaccccaagtttatggtattttattatagcagcccaaatggactaagtcacctgtttttgataaggcatctgtccgtaaagttactaccataagcacattccatttgctcgagttggaggtttagctctccaatttctatttctaaagagcgtttattattccctcaatcttttgctcttaattttgtgattttgcttgcctcaatatcaaatccaaattgtgattatcatcttcacatttctacaatattgttcttttctatatttctaaatgtcatttaaagttttgcaaatataaaaatgcttacactaaaaaagttagaaaacacaagcaccctctcccatccttctctattcctagacttcctatttcaactctttttctgatccttccaatatttaaaaaaaaaatgtttctagttggttagatttatttttctagataatatattttcttgatttatgcattaggcattatctatttattcctttttttatccttgaggattttgtactcttcttacttcccaactaccttataattattttgttaaatcattagtcactattaacattatcatggtataaataatattattcatggctgagttaaatattgtttaatgctttatgttcctcttttgcccatttttggaattaataactgtctttctttttatatgattggttctctatatattgttaatatttcaccaataaatactctgacaattatttcaagtgatttgtttcaaatatttaatttcaaacatcatacttgtcattgcaaatgctcaaacactttagatgttttttctgttctaatgtgttctaatgtggtttagttgttctccgttgaggatagaatggaatttctccttaatcacttccaattatctctggtctaagtctcacatcatgtttctttttgtctgttctctcatttgcagaaacatatctccttaacagaaaaagggcacttacatccttttagatccttcacatttgaatgctatattgacttgaaatcgaattctagcctggaaatcatttttttctcaatatttagaaggcttctccaattgtcttctagctttcagagtgttgagaagtctgcagaagccattgtgattcctgttttgttgtgtatggcctgttttttctttctttttctctgcctctttcctctggattttcttcgaatctttggtatatcctaaaatgtcatattatgtgtgttgatatgggttatttaaaaacttctctttaggcctatgttcccttgataagttcttcatctctctttgttctctccatctggaaacggattagtccaatgttgaacatactggattgatactctcattttattatattgctctctgatttcatttatttgaccttttgttttccaggaaaattccgttactttttctactaattactataataaatacaataaatattttactttagctagatttttaatttgcagaaatgctttctgattgttcacttttcataacattctgttcttaagttttggaaaggcagtgacatgtaatggttatgagggtggactttaaccacactgcctaggttcaaatcctgactctgtcatttacctgggtgcccttgacaagttatttagcctttccataaagtgcacatgacagtaatgcttgaaagatattgctatgagaatgaaaagagacactattatggtgttgttggaaaagtgcctggtacataataaacactagatagtaacaagcaaatacttggaatatattccattatctttctgaagttattaattatcatttttacaattttccttctattcccttcattatcttgttttattctgacttcttctgtttgctttgatttcagtctttcatatttaagctgttgtcatatgtctggagattgtgctctctggatacattactaaagatcatggtatgaaaaaacccgactggaatttctatgtaaatgggtgggcttgtcaggtgatcaactagcagttaagtcttttgttttctttttcttttttttttttttttttgagacaaagtcttcctctgccacccaggctagaatgcagtggcacaatcatggctcactacagctttaaactcccaggctcaagcaatcctctcacctcagtctcctaactagctgggattacagacatgcaccataatgtctggtttattttctatttcttgtagagatgggttctcactgtcttcccaggctggtcttgaactcctggactcaagaaattctcctgcttggcctcccaaagtgctgggattacaagcatgaatcaccacacctaccccaaggaaactttttcatcagaagaccctcaaatgacagtttctggagttcttttctttgagactattcaggtctgcagatactaacctttccatgccctgctgggctgtggagaaaagaaagtagtttccttgctgccttcaaaggctgagcctctcagggcctctgtgatgcacactgactcatttcattgcagcctccttgtctacaacttctgagattgcaacgtgctccaactctccattcaccttttattatccaaaacattagttgacatcctttctatccttctcccaaatctctttgtctctttaggtttgcatcttcttggtaagtgtatgtagctatttaaacaaaatctagttttgccaactacattccttcacatttttattaactccaagtctcttccttcaccctgccttttaaaacatttggacatatttatcttatttgctcagctcctaactatatgaaacatatagcaggtattgattcctgtcaataccacccctaccttaaagttttcagattggcatagggacatggcagaatgacacagtaggaagaaagcaacacacacagatgaagcctttccattgaagcccattcttacatgtaagtgattgtgctctctccacattttcatattcttctcacaagcacaaaaatacagtattctgtggaagagtttgccttttcattctttataaacaggataaaacagtcgaagctcaagtttttattaaaaatcttcaaaataacttttaaacttagaatattattcagtaccactgaatcgtgcctcatttggcagaaaggcaattctgtccatattacaatactgacagaacaaattgatctaaattttgcacagaagtgctttgttataaattttgttattaacttttatctgaacatagtacacctcgtgtataatattaaaattgcctgcttaattcatactttattccccagaagcaaagaggaaagtagattgtactgatcaatagaccatgatttcctgtctctacctactgaagaaaaatgcaattagtagaatttcatggaagagatatatatgagcttcctttcctcagaaacgctattcttaaacaggaagaacaagatcatttctatttcctttctattttcactcatcagaaaaatttatagcagattcaagagtgaccagattatttttcaggcctgatcatttgaaactacatcaaagttgtaaagctataggagagggtaagtgtattgtctacttcttaaaacaatcaaaagcctcatatgatcttcatgccatcatctttgagaacaatataattataagatgaaatactccaattgcatgtcagtttaattacaaataaatagaaaataattacggtggatgtttttaatgaaaaaatgtgtatcacagctaaatcaaatttcctatgtatattacataaatctgcatatatacttaggtatatatgtatgtgtatatgcatgcgtgtgttcatacacatacacatattaggctgttccaattaaatggaattccaccttttctttttaacataaagggtaataaaagagcttcttaggagactgagtatattgtaaatagatgcacattgccttctcccacccaacacacacaaagtgaggtttatacatgaagtgcaaagccacagtgaggcatgctgcctcggaagcctacctgcattctaactgaaagcatctgcatgtgttatttgtgggaagaggaaacaaaaatcaagtgatcattgacaggattttagaaacatgttacctgcaactcaattctattttttctcaaataagaaaacttttccataacatttgcagccatgtttatgagaaatgaaagaaagatctggttttgtcaactgaatatacaataaaccgaatatccaagttaacatctgtgcccagcaacaccctctccaaccaaaataataataataactgattaactacaaaccaatatctggttggaaagaaatcagatttcttgttatgtttccaagagcatgtaattctgacctcctggagtggcccctgcaagcagtgaaacactcagactgttttctgctgagcaggcctggcagaagggtctgcttttcctcgttctacccatccacggagaacctgtggtgtgaagagagcatgtggactttggaggagtgatgtagagttgagttcagacaagctacatgaacttgagcctgacacctgtcctctccaagtctcaaatttcctcattaattaaaaggagaaaataacatttcctcatgagattattgttgggattaaattgtgcaaaatgtataaaattcctgacacagagagagtcttaacaaatactaatttcatcctctctccttcagggacaaaggtagaaagcctgagattcctaggaattcacgccccatacttcttctaggacgtggtcatagtgtgacccaggttcctgggaacatgttcaacccctgttttcaaagcctgtacacacatcattgctctttttacctggtgttttcttgctgtcacatgctctaatgatatttgaatatgctatttatccccagctaccagttaagggaaatttctacggggaattcacttctgctttcacttagatttagcatttagctgtggatttgcaaatgcacttgacacaaactccacactcttttccatcaccaggaaggctggaacgtctctggtctttgcctatctatgccattctcctcctttctttctctgatctggtcacgctgatctctctgcacttggactaccagtcagttcttacctgtcctgggattttgctcaagcttttccatctgcgggaagtgcttttccctttacttttgacatgggtggctccttgtcatcaaagcctgctttccttcaggccacctgtccgtggaggtcctgtggtgtgatgagagcatgtggactttggaggagtgatggcatgagccttcatgtcacctccacaaagggctttctccaatcaaacacatataggtgcttgattgtttttactgttttgatgatttgttgtgttgttggtttattttggttactggaaggcagaaattaggcctatcgctagcactagcatagaacctggcagacaggggctcaggaaatggttgttgaataaacgaatcgtctcaactgtataggtgtgcacgttttaggccacctccttggattgacaagtaacaggattaaaattgcagaatccgtacccctcaaaactcaaaaggattatggcaggtagaacaaatgttgaattagacaacatgagaaaaaaatccagcaaaaatttggaaacacgcatgctacgaactatttaaaaaaaaaacactttcagctgggcgcagtggctcacgcctgtaatccaatcactttgggaggctgaggcaggtagatccacatgagctcaggagttccagagcagcctgggcaacatggggaaacaccatctttactaaaaatacaaaaaaattagccggccgtggtgatgcatgcctgtagtcccagctactcgggaggctgaagcaggagaattgtctcaacccaagagatggaggttgcagtgagccgacatctcatcactgcatgccagcctgggtgacagagtgagactccatctcaattaaaacaaaaacaaaaacaacaacaacaacaacaaccaaaactttctcctgtatggagaaattcataagatatgtcaaaataccttcctaatgatgataatgatctattattgatctttataacattctgtcccatggcttcaacatcttttaagataaattattttattctaacagctttcctgtgaagtacttattctgatttttacgcatatgaaaaactatttgaatttccttttctaccgactcagctcctgattccaggacttctaattctgaacccacgagttttcctgcaaagcattcattgaaatgaaatatctcctcacccattgaaagaaattatgtcggtcccatctccactaaaatcctggccctataattctctgaatattagagcttgacttgaatttgccaactcctgtttgtgcagatagtgtgttagaaaagtaacacttctcctttgaaaaagaaaagaaactttctttacaagataataaatatataggggaaaaacatgggcttttgtttttctagtttatggtgcaatcagtatgtcatgtggttcatgcaaaggcagcttctttatttcagacagcaaaggtcatctcttctgacaaccagtaggtgagcagaatccactcagtagtatcaccttaccaaggcagcaatggggaaactacagaagtttgttgctggtctttaaaccagcacagctttgatcaccaccttggaaaaccctaataagcttaagagtcttttctatgactgactaatgtcttgactagtgaaggtcccttgggagaatctgtctctttctgtctctcttctttttccagagagtggggctctctcagtcacccaggctggaattcaatagcatgatcatggctcactgcagcattgaactcatgggctccagagatccttctagtcctcctgtattgctaggactacaggtgttggccaccatgcctgtctaattttttttttttcttttctgcagagacaaggttatccctatgttgcccagactggtcttgaactccgggcctcaatttatcctcccatttctgcttctcaaagtgctgggattacaggtgtaagccaccaagcctggcctcaaaatccctcttttaggcagacagagataagaatgaatgggatttgaattccccacaggcataatatattgtttctgggctcttcccagcattcttgttatgctgcaagatttggaaggaggtggtctcatcttatttgtttaacaattatttaccaaatatctattatgggcctgggactctgtcaggtgtccaaagacggaaaggtatgaactgtgccttccaagactttacagttcagtgggaagacaggcagatcaacagagagtgagaatccaatgtaacatgttctgtatcaatctgaggtgtaataagcagtgaaagcatagagggtaaattgttaatttgcctggagaagttaggaaatgttttactaaaaaggtaattcttgagaaaacatttagtgaaacaggaatttgtcaggtggacaagaaaaatggggggcatattctagcaatgggcagagtatatgatattagagacatgaaattgtttggtactgaaaccatctttgcaagattatggcagcaagaaatctgacatagctgactccatcttgcttctgacctccaagctgtccttgatcattcctgagtgtaggccaagctaactttaggaagaatttagtatatagtttaatcttagagcaaagattaaacttcaaaacatgtctctttctttgttcaggtaacattatgcagacaggagagctctaatataacattttggaccaaactgagagagaagaggggtgatcttttctgcattctgtttgtctgtttcatagacaagaaaactctgaggaagtttagtaatcaacaagctttagaaattttgaaaactggaagaaaggtatatctctctatttcccatctctacttcatgctccacattttagtcagtgccttttatctaaccacaaatctaactgtgtccctctcttgcttcacaatggttcttcagtggttccccaccccatgtaaatgtatacatgctcgccttacattcagctctacgctattgagcatagtatattagttttccaaggctgccataacgaagtcatacaaactgggtggcttatagcagcagatattattgtctcagtattggaggctaaaagtccaaaactaaaccgtctttgcaaaactaatgaaaggccacattgttaggcttttatgagagggtcttgaacactgataagatagacacagtttctaccattccttactgctcaggggtcatgtagccagaggttacaatatttgtgactttcctaatttctcctgtagataacatcactattgtagaatctaagattggttttttgaggtatctttcacgctgccccacccagactcatgactcaactggtcatgtggcctcatccagaggcagactcagtgcccgaggaccattttcaacaccctgtgatttcattccccagccaatcagcagcacccattccctaactccctgcccacaaaattgtccataaaaaccacctccaagcctttggggagcctgattagagtgataactctagttcttctgcatgggctggcctcaatcaattaaattcttctctactgcaatgccatagtttcagtggatttatgctgtttgcgtagttggcaggaaaacctgttgggcaaatacaatatggtctagaactgaggaataattccctacatcaaatgtgtatgataaataaggagaaagacatgggagggagatgacaggtgttagtttacagccagattctgaagcatttggatggcatgtgttatgggttgaactatatggccaaaaaagatatgttgaattcctgacccccagcacctcagaatgtgaccctctttggaaatacgattgttgccaacataattagtttagttaagatgaggtcatatgaagcagggtgaacccttaatccaataaaaccagtgtccttgaaagaagagggaaacttggacacccacatgcacaaagggatgaccatataagaacaaacagggagagactggccatgtgaagatggaggcaggaagtggaattatgccaccatgaatcaaggaatgcctaatgcccagggctatcagaagctggaagaaacaaggaaggagtctctcctagaggctttgaaaagagcatggccctgccaataccttgattttggacttttagcctccagaactgagacaataatatctgtggctgtaagccacccagtttgtatgactttgttatggcagccttggaaaaccaatatactatgctcaatagtgtagagctgaatgtaaggtgagcatgtatacatttacatggggtggggaacaattgaagaaccattgtgaagcaagagagggacacagttagatatgtggttagataaaaggcactggctgaaatgtggagcatggagtagagatgggaaatagagagatatacctttcttccaattttcaaaatttctaaagcttgttgatcactaaacttcctcggtgttttcctgtctatgaaacagacaaacagaatgcagaaaagatcacccctcttctctctcagtttggtccaacatgttatattagagctctcctgtctgcataatgttacctgaacaaagaaagagacatgctttgaaatataatcctgccaggtccccttatttagtgatgggaatgtcatagtgaaaaatgataatactaatactatctatactatatatatttatatatatgtatgtatataatactatataatatggactcttaaaatgattttgatattgatatttttatgattaaaaaattcagttgaaaactcatcaccatgaaatgaataaagtaatattccagtatcaagcaatttgacttcccagaattgtttttcttgatctttatcctaattggaaaaatgaattcatatccatatcttgaactatctactccaatgcaagcaaaaatcctaagaagcattctccaagtaagatcaatactaaggatactgtaatacagctgtaattttctgttacgtatatttcttccaatgtaatgaactgttatgataattggtagctttaatgaaagcaaatgacttctttctaatttgggtaggttgtattccaagctctgatgttcctaagtctatgtactctttagctgtttctagtcttggatggtttaaatagttcttattataaatgcagaaaaattgagtatgttttcagtatttccaacaacataaatgcacatgcacaaactttacaagtcatatatctttactgaaatgaccagattcactagagagcaaggagacactgctaaagcattctgattcatattctgcaatgtcatcataacctcctgagacacaacatgtctttgcatatatgagtaaataatttaacaactgtaagatatgtcccaaaatatctttcatttcatttactggaataccataactgacactgatgccaaaatattaattatatgacatagccaaaaatgtaaagtatatgtttctaattgaattatattgaaggagaaatttaacatgacttcactttgttttgaatgcaaattacacaatgatattattaaattaagactctgtaagtatgaaaaacttttgtgtacacaatttagtattcagttgtctttggtatttttatgtaaaatcataaaatttatttgggaaagttaaggctcaaaaaagagctggagaagctcaatttaaggggaaaaaaataaagctgagagcagcactgggtctagagcccaagtgtctctacttgtggtacaaatgtagtgtagtcttaccatgtgagtgagcttcttccccagtaactaagccctgggtacaaaaacaacagtggttcctatacttcgtgattcatacaaagttatattttagagagattagtggccttaaacagaatttcacaatagtttcttaccctgcaaatcaaatgttctccatggaaagaacaggtataaaatacttggaaggagctgtgaatgccccgtgtcagcaattgacatatgtgtcagcataagtagtggtagaataacctaagtaggaaaagacttaacaagaatataggtacaattaagaatggtagcaaaagtgaaccaaaaatagcttgtatctgcatggggtggccaagttgggtatacacacctactggcattcattcattttgtcattcctttaccccaacaccattttcgagttcctactatatgtctagcattggtaaatacattcgttttttaaaagtctgatttgcttacactatctggatttttaaaatgagtaatgtctggttctgaacccatgcaattgatttcaaatcagataatctaagaggaccttagatgcctacatactgacttgaagaagggttttatggagacgccgatggagaatatggattatatgttttaaagccaccatttcccatactcttatactcagtctcattcattattaaagcctagaagtagatgagaagaagggagatttcttggaagagaaaaaatgagcaaaatgagcaaacatttattgataatctgctatagattactgcatctcactaaatcctcttaacaacagtatcaagtgttattgtctcctgtgttgcaaagagaaaactgtggtacaaaacagctaactcacctaaagacaaaaagctaacaagtagtcaagagttaaacccaggcctgtctgacaccactgtaccacacagccaaacctgtcatgcagaataaaactcacaagataattagtggagaaagatgataagccaaaagcaactccatgcatttctttagcagttggctgtacatctaaagctttattttatagtcaaagaagatcgcctctttatcctatccctccttctcttcctctggtttctttcaattcattttccactttgtaattcctttccaagtgctcactatgttgtcaccttctcctaagacccaagggagtatttttaggagcagtcagaggaagaaaccgaaggctggggaggatcactccaaatccactcagcaggaaaagttatagcatgcataatttccaaaacagggttcaggaatcaaagggatggagaagcaactgaaattgagcagaggggcaacaaaaagggcacaccagggagcttgtaaaaccaagaagaaaaaagaacatgttttgggctgggagtggtggctcacacctgtaatcccagcactttgggaggctgaggtgggtggatcacttgaggtgaggagttcaagaccagcctggccaacatggtgaaaccccatctctacttaaaaatacaaaaattagccgggcatggtggcatgtacctgtaatcccagctactcgggaggctgaggcaggagaatcactttaacctgggaggcggaggttgcagtgagctgagatcacaccactgaactccagccttggcaagactctatccaaaaaaaaaaaaaaaaacatgttttggtttgtatacctcacagaaggcctccaagacgcagggaaaatatcttcaatgactcatcctctattgataacactagcttttacaccaggagtcatgctgagaagttcagagacagtgttaaactgccacaacaagtcaatgaactcaacaaaatgcattgcttacacataaatctacaattgccttgctggttttgtgatgcagctttctgaaatatgtatttgtttccttttaacatgggttcttggcctccatctatataccaagcagagatctaagcaccagcacataaaatatctcttagcatcctaacaataagtctgagagaaagctttatttttcccaccacacagaaagagactgtggatcagagagtagtgtgactgcggatgtcatcgattccaaatttaaactcaggattccttcctttaaagtctagtggtctttccgttataccatgctacataaacttctcaacatcacaatgaataaatacaatgctagccacaataaaagtgcaaaaatgctctgaacatatgaggagtttaataaatatttggggattggtagatttgtataatttcaaaaggcaaaccaacaaaccttgtctccttgccaatgggacgtatgtcttgacaatgaaaataacaggaagacataataatttattcacttccaattacctatctgcagatggacttgctaattggttctgttttcgttattagtaaagacataatcttacctttttaacaattttcccagatacacaaagggcaagctgctactctcattgacaactcattggcagtaaccacatttaaagtcagttgtgttttagtcaaaggagacttttctccacttgcatctgaattgaagtaatgcacaacaaatatagctatcaaatttactaattgtgttaaataaggatatccaagtgttgcaagaccatcagaaaaagcacactacaaaagctaagtagtcaatttcaaaaagccttttaacataagtatttcaaaatcattaattttgttaccatttaacaccagtgattttcatttcccacaatctattctgacatttaaaggaagatttttaaagtatctcttgcatcatataagactaccaccatataatgccacttaaaaattactgcattttacaaaggtaaaggcagggggaggttggcccataaaaaaatctaataaaaccttccatatatatatataaaattttttttttgagacagggtctcactttgtcgcccaggctatagtgcagtggtatgattttggctcactacaacttctgcctcccgggttcaagctattctcttgcctcagcctctcaagtagctggggttacaggtgtgcaccaacatgccttgctaatttttgtatttttagtacagatgggatttcaccatgttggccaggctggtcttgaactcctgatctcaagtgatctgcccacctcggcctcccaaagtgctgggattacaggggtaagccactgcacctggcctttctcatatttctttttgagccatgttagtgttatccagtacaaagaaacacacacatgcacaccacctagagacctattgtcatggttcaaacatcttaggatatagagatcatgaccaaacaatattggaaactcttactaaagtaagtaggctttatgattagtaaactgggcattttctttgatcctctgacagaggagatgacttttgctcctcaatgattgggttgaatgctatgccaggtgccttcggtcatacagagtggtattgacagagggtttcatggctcctagaaccacaagaaagccatccactaaaacatctgtaccagggcggtgttgtcagaagacagaaaggaaaataacagtaaagaacataaaagagtagccataaataagaggaagttgcacgagtaagtcaggtgaatggtttttaatccggcttggacggcaagcttgaaaaaaaaaaaaacacaaaaaatgacccagtccagagcatcagattttatttacataaatatcaaaaaaagattatgttaaaatgataaaaattatttaatttaaaaccattttgtaaaatctggaaaatatatgctaagtgaacttgtggtttgttaataccctttgcttggggatttttctactccacaatttatgaaaagtcccaaatattctctaatgggatttttagcccagtcggttggaaagcacaaaactacctctggggatttatccactgcacccattagaggctctgtacactcttccagctgatcataaagaccttgagtactgagcattaccaagggacacccagtccattcctggcgtcctggtgtccttttttcttttctgtgttcttagtgtgaggtcctaaggtgatgtgtatggcaagaatgggactaagaagaccttgactgaaaccgcagctcagccctgaaactgactgaccttgggcgagttcctcaatctcggtgccctgttgcctctcatttggaaaattcaattgcctactttacaggattgttgtaccttctggatttaataacttgtgaaaataatatacatatgagagattctcaaaaagacttcttggataggtgaaaatgaaactgaaaaatcagagaataaaaaatggtgttcgtctattcagaagttgttctaaaactttggtgagcataaaatatcacctaagcagcttttgaaatgatgtccattctagaaattctgattgagtaagtctggattaagcaagcattactaatcatggaaccacacattgggaaataccgctttagaacatagtattctatcaaaattgtaaaacaaatattggttttatttgaaaacattacatgaagtgattctttctttaatgacatgtctctcatttaagtgttcaggtttataaggcctctgattctcaattagaatgagttccctatatccccctcataaatagaactatatcaacctttcacatctaagcagcactgagctctaataagtgtgccactgtatgacagccaagtgtggaaaggcgactggaaaaacaccacatattatttcttgcctatttattttaaaactgagtaataaaaggtgttcagcattttgccatataaggtactaagttcggaaatattttcacgggaatcaggtcttccccccagtgatggcttaatataatccacaagtactcttcattccttcataaagttgatccatggatatttattcatagaagaggtcttagtggtcatctagtactatccatttattttacagctaaagaaaccccagctaatgtcagctggcttgtcctccaacccagaatcttcacaaatgaagaagtttccctcccaagggaagcctaattaagagccaagtctacactcagaaagatttctccactgaaactaactttgctatccagtgttaaaagggaatctagtgtcttaaatcatagtattagtagtaattccttcatgtaaataaatgcacaacatttgggttaacctccttcatagtatcttactgattgataatataagaaagcaggatgacagattcatttcacacaaaaatgcactccttcaaaataacaaaattaaccagaattcattttacttcagatcctgaaagtccagcattaaaaaacattaaaaaggctaggcatagtagcttcatgcctataatctcagcagtttgggaggctggaaagaggatcacttgaatccaggagttcaagaccagcctaggcaacatagcaatacctcatttctatttaaaaaaaaaaataaaaatagctaggcgtgttgttgcatgcctatagtcctgtctacttgggaggctgaggtgggaggatggcttgagcccagaagatagaggctgcagtgagctgtgaccgcactactgcagtgcagcctgggcaacagagcaagaccctatctctaaacaaaaacaaaatgcatttaaaagttacttcttctgaaaagataattctcttccacattacacagtaaaataaatgaattcattttggccgactgctgttttgggttatttccccattttgctgttttgggttatttccccaatttccttagatgtgtacaaaaaaattagtgctgatgatatttttaatcttaaccctcatctgcttttttgatagatttttttcccagattttttctgttaacccaagcccacacagccagcaaaactcccaagaactcttgcaaccaatttttccttttcaattgtataaagctttgaaagttattgattctgcaaatgtgaaaaattaacttatcaaaaaatagcacacataaaatgggaactggccaaagaaacacaaagaatattgttttaactggaagttctatcattaactgctacaactactgtattcctgatatggctttttgcaatatatttatcactatatgggaacgatttaatctgctccatagagagagcagtaggagctctcagtggcctcaaaatatgatggttcttaccaaaaacaacgaatctaaatttcttgcagatagtaggcctaacttttttttttctaaaaggaaataactctcctctaaaagtcaaatttgtttttaaaactgtggtgtctttaaccactttccccccccccagtttttcacttgacaccttgtcatgagttacagtggcttgcatcaatcattctgggttcacacagaaaatattttgtggtggttgactatcacatgcgagaaactaagtgccctttgcgggtgactgcgcaggtacctctgatttcttgccaaatcattcagaatgccgcaaatccattaaatctctccacagggaggaaaaagttcccgcattctagagagagaatttatgagttcatttcaatcaccacaaatgaaagccacccttaatattcattagagattttacagtggcaatatgcattatctattcatatgcccctctaaaaggccaatttcccttgaaaccttgcatggctccaagccactctttgtagaaacaatggcctatgtccaagtggaatcaggggaggcaaatggatgacatttccttatccattggtagtaattccactaagccactatggtggctatgagtttctgagctttaaaaattaaaggacagatttggaatgtgcagtcgtgtcattgtatcacttctctgctgtcatctgtgaccatatgtcctaaattgaatagagcttttcggttggcatcacaagagatgacttttgaaactgacatttctttcatttggagaaatgtatatgttggagacataatcctatgagcctgagagcttttcattaatctctgtctttctaccaccatagttcacgccaccatcatctttcatctatttttcccttcaaatctattttcttcactgtatgtagagtgatctttccaaaatatcaactcaagcctcatatcctcaacaaatcaacaagaaatatcaaaataagcccttggcttaaaacagttcttgcttagcttcctcattgcttttagggaagacacagcaaaacagcataacctgtaagaccatatgtggtctgactccttcctcaggcttaccttatcccacatctccgtgttttctctcccagctattatgaattctcattgtccttattatcagttagttaactcttctcttccatcacatttgaactctatcatcactacccatgaaagcattttctgactcctcgcctattattggccttcacagaaccatgtaacaatcatagctcttatcaaagctggcatttcatgtttatttatgtgattaaatatatttttgtttctaattagactataaggttcacaataatctgtttctacccaacagtttatcctccttaactggcatgatgtaaatactcaaaacaaattgttgagtaaatgaataaatcagttcttgattttaacgtatcttgtgccctggataaaaaatcctttctatgagtgagacatgggcttccactggggttgggcttgaggtgagctgcaataaagccatatttctaatccaattattcatcactatggttgtatttaatagctgggaaccatgagatgcataaagatcttacactgaatattcataagggtttttagagtgaattcaaccacttgctttacaacttcccaggaaggagagggaacatgaatttctttccttcatttttcattctttctgaaaaaggtggttatgactgagcgatatattatgactttgaaataaaatatcatgaaatgcatatgtgatgtggctactataaaatatatgagaagagttttaaaaaggtaacatcattttacatatgcaagacactgtcaatacagtcacaattcgggaggtcagaaaagggcaacggtgatgccagcatgtgcactccagcctcttcttctttttgtctgttttccccagtctctcacaggcatggggtcagtagagtacccccaagaagctaaaagtaaactctcacccgttgctcactgtatacatttcagtgagttagctccagctttcttagttccagggagataattgggcaaactatatgaaataatcttaaaaactactggaaaccagtaatgtaaattcagtgcaacattttctcgtgtaatacagaattgttgatggtgacatcctaatgcaagaacctgtctttgtcaccattgtggccacacagctcagggaaatacctgatatatcatcgacattatgctgttgttactgaatgacaaataattagaaacatataataataaattataattaaatgataaaaatttcccttgaaaataatagcttttcttcattaagttccaattaggtgtcaggtacagttaaagatgttacatacattatctagtccaattcttactagaattccacaaagaaatctttgtgttttccatttggtagataagaaactgaaactctgagaaacgaagtgacttaacagttacacagacagtaaatggtgaggccacagttgaagtccaggcttatttgactcacggagtttccaccatatgctgcttctctttactgccatggttatttatagatctactgcaaaatttaaagacaacttagtgatgggaaaagtcaggactaagagttaggaggattatgttcagcatcagctctgccatcatgtgctgtttgggatctcaggtaattcacttaatcttcatgcacctcaatttctctatctgtaaaatggcagtaatgctttgcctaattcatagagctagtagaagagcaaatgtgagaaaagttatattgcaccttgaaggcagggtctctaattatcaagctgttaaacccttacttttaattagccctttcacatccaaggtgtcatttcatactgcaagctgggagctgatgtctccatttttatagatgagataagtaaaggtaagttactagcctagtctcaaaaattacaaagccatgatctttgcagaaaaactttggattatatgtagatttcagcttaaaatcctgctctgccacctgcataaatcggttatcctctttgagcttcagatttctacatataaaatagaaataatgataccatgatactgtcttactgaatcataacacaattaaaagaatacataaaattacctgaaataaagtcaagtgctaagtcaatggtgaccatgattatcacaatgtgtctctgtgctgaaaacaagatttcaaaggcatgaaccactcaaggtggcacctagtgtgtatgtgatgatgggtgggagtcagggtgatggtggcaaaagcagatgtctctctccaaccaagcactctttataccgcacagaccctgatcttctgctcccttctacagtcttacttaaacttcacccatccattttttcaaagcagactttactcctctgaaatagcattgaaaaggatttttaaagtacttcttgttagaatggtgagagctcctgagaatgaaaatggaaattcttgttcatgaagaagtttctgtagccctgaagtgaattcatatgcatacttgctggttctgacttacattgtttaagtcatggctgatgcatccagagaccatgagggagagagaaaggagatgggatagaggaagtatagttgttcagaaatcaaaacaaaaacaaaaacaaaaccctaaacctaaaccagctgaggtaaaggtaaaaaatgtagaaatacggccaacaggcatcatctgaagaaaattgctttgaaaaattagaaagaaacctttatatacaaaactttttctgcacatataatttatcttcctcattgtatccttatgacccaaactattgaagacagcaaggatcttaaaaatcattgacattctcctccattccaaagatgaggaggtagaagcccatggagattaggcaatttgatccaaagagatcctactatgacagagctaagctcatagctgactcttctggctttgagcagtattcccttaagggtataacacagcttctaacacaccatgctacacatgcaaaatatgtcttttctatagtttgcttagcagtatttgaattatgaacatatttctttgcaataaaagaaaatttggcaacacttggagcatttgccaaggctcattatatgttctaatgagctccttcaaatgttctaacattcaggcttctctcctgccaaagattgatgtccagctttggtgatttgcttccttctgttggagcatgcaagagaggctctaagtaaaaaggacatttaggtctttcatggctaataagcatattgggcccccacctcagattgtccataattgtcttcctccttctatttgagaatccagtgaaacgtattccaactgtcttgtgaaagccaaaatgtagttatacttgattatcatggatcttatttcatgatcataggaactaatctaaattacaaatgttttatgataactttaggaagattttactataaggaatatcaattcaactttctccttaatatgatgcctttgagtaaacaagcacagagtgaaaacacatgaagagagaaaaggagcaaaatccttagggtaattcatgaagaagagggattcttggtttccataacaattctataactagatcacaggactattgttttcacatatgcatgaagtttgtgtaattgggaaaagccaaacatcaacccaaataatttgactggtttgaatgctacattgctgtgtctcaaaagtctattttaatattacctctatttatcctgggtttctagactaatacttcacacttacagagaaattacattttctcattttatctttatttttattgtaaaatgttttattggaaaagacacttaaacattttatgcacatttatgatttacttcatattcaacctaaggaatttccataaacctgacatcttctactattataatatctcatattttatgtgtttattctacaagctcttctttatctaataaaaaatgtgtttgcatgtctggcgagaccttttttcaggcttattttatatacaggtactacaaagtgtttgccatattattgaatttttacaccaaaaattgctattacttattcttccgttttaccgttttcttttaataagatcacgtaaactctcttgtccaccccttctcctaacacacatgcatacttctaagctctcaagttcatagactggatggcttaggaggcaccttacgtgactttgctaaatgagtgaatgaatggataaatgaatgaataagccatgcagaatctcctaattttcaaattcttctcttgggtaaatgctgattctcctagcatcaaatattaaattggtcataattaaaatttcatcatgtaaaattgtcataattaatgattattttcttgctcaccttaagtttataaaattatttttagaatctttattgtcaagtatattaattttagcacagactgtagtgagtatagatatgttttggcatttttgcatcacattttcctatttatcttttcaaaattctcagtccagattaccatttatgatgctttcttttccataagtggtccaaacacatttgctgaaactttttacctttccatcccacaataattccactgcaaaaaagtaaatttaaagctgttccaacaactgatttttgacgttggagatgaaacacaaggatgttaaattatgaggaattatgcattgatagttcatagtctaccttcttccgggtgagtgtgtgagctttcttcttagtatgtcttattatttaccaggtccaaaaataatactactcaccacaaatgggaacacagaggttttttggcaggagcctgacatcactaaagcacaaagaaaatgagaatggaatccgtgaattgtttttcctttttcctaaaccatgtgcctccttactcactgtctttttactggtcctctctagccttaattctttctttgcatatgtctatttttcaaagtctacatcatggattcttactcattcacctacacttttaaacttcactactgtttatcaaataggtagagaagaaaagaaaggccaaaatgaggaaatagtatgaagatgtgaagatggaaaaaaatatcattgtgcttgatgaaaggatgatactcactttgtctgcagtaaagagtgtgtaaaaaagacctgtgtgcatctggttagaaggaagattaggtgaatgagtttagatttgaccctgtaggttgtgggggaggcgtttaaaggtttgtgaggggagcagggacattattagatttgagcttcaggatcattaatcagggtagcatttatcagttagaatagtcaagaaaattaatctgttagattaatctgataatggtgtgtcatgttgattgaagggggaagaccagggtcagagagaccgagggagactgccaagggagagaatagagagacaaaatggaggacaggcacagacagcttatcccggttaagctgtctgtctccagttacctcgtctgtctcccagagacctctggttttcttgagacatattaaaacttttatacaactcaacagtgaagctgtgtatcctaagagcactttcccatgccaataattagcatccactgctgcacgtttgaactgaaagaattgtaaaaccttttgttactctatttattggtgaacattagcagaccacctgttcctccaactgaaacagttgcgtaaagaatttttccatcatccacacgatttgtcaccattgtgatgagttcatacaagattccaaaaaaagtctcatacttgccttagatacctttaagtacagctttgtttatgttctcaccttcagatgctgtatatcaactacactcatttttctttgatttttgttatatgattctgtctctcactattacaatttttctcactatactgtttgaattcttctgtaagcaggtctctgttctgttcttttgggtctttgactttgcctcttcctgaaagatcttttgttactgtcactttttaaacattttcacactatataaaatgggtttgaaaatattttagaaatttgagaggaggaatggatatttgctccttgtttatgtctagattgcatccgtttctttttttttttttttttttttttttgagacggaatctcactctgtctctcaggctggagtgcagtcgtgcaatctcggctcattgcaacctccacctcccgggttcaagtgattctcctgcctcagcctctcgagtagctgggattacaggtgcatgtcaccatggtgggctaatttatatatatgtgtgtatatatatatatatatatatatatatatatatatatatatatatattttttttttagaagagacagggttttactgtgttagccaggatggtctcgatctcctgacctcatgatccgcctgcctcagcctcccaaagtgctgagattacaggtgtaagccaccacacctggccccatttcttaatcttataaaaataatttgtttatccttataaatctgaaaaagtctcccagattttgaaaaatatatgtgttattataaaaacatatgaaaggaagactttgtctccttcacagcccacaaactctatcctttcttaccctcattccctaccaagcctatggctcattttcctccttttgttaagatgtgccatgctcttagcttacagagcttcgtaagtactcttcagttattcttcttataaattgatttgaaacacttggcttcaaagattatttttggtcacctcgactattccctttcttaagatgcagctgaaatcccctctcaacaccactcatctcagatgttagaaaagatcatcatccttggtttttcctttcccatttctcttgtggagtataccctttcataaatctgatcttttacctttctcaatttatatcaattccataatcacaaatatttcttcactccctgatcccacagacactacaaacaacttaacttcatgttaaacatctctgtatctcattttctgttgacttctgtgaagagcccttgacaaataatacatttccctgtctgattccgtttgtttatagtatctcaacggaataaaatgttccaatcttacagacctctgggtgctttgatttttgcaataaatattacttactatagatgaatcccaacactatttcactaaatttttctaatagatattaataaccttgcttaactactgggtgtttttggtatgcaaagagttactcagaggaaagagagtgagtaggactgaaaccaccttacagagttggaattagtgggtgaaagagggtaaggagtttactcaagcacactctgccggcaatgtcggagctgcattaaatccatcagcacccaccttgagagtgggaggctacagtgggcttagcaggaagcatatctgggtgaacaaggacttcctcaaagatgagttaatttcaggccacctaaaaactctgatgtaataatagaatcaaagacaccaagcagatcacaaggtcaggagttcaagaccagcctggccaacatggtgaaaccccatctctactaaaaatacaaaaataagccgggcatggtggcgggcacctgtaatcccagctactagggaggctgaggcaggagaatcatttgaacccaagaggcagaagttgcagtgagccaagatcatgccattacactccagcctgggcgacagggtgagaatccatcaaaaaaaaaaaaaaaaaaaaaaaaagaccccaagattgtactattcctaaaatttttgaagtcaaggagaaactagtgtccttgtagattagattcatttcccatgaaatgtggggtttaggcccagctccatcatatctgcatatcttggcacgtatatttttaaaaatataatcacactcttacccttttaaattgcaaaaatgtcgcctctgactacctgccattaatagtaagtaacattcattacagaagcacatcttttcaaaccccaacactgcctcctttacattctataatatgaaagttaaataacctaaataataaccctgcaattactattgaaaaaaataccagctatgctaaaatgaaactggatatttttcacttgttgttgttatagaatatatgtgtagaatacaaaaataataatttgcactcatccaacttctttcactttagtgtctcaaatcccggagtgtaagtggtctcattaagtttaccaaaccaatttaactctaacatgctcttgaaccctctctccaagtccactgaggcttttctgtcacgaatgctgaacaatatcatctgaaattctgagcattctgtagatatgtttgaccttctgcagataaaactcacttaatcgttaagttatatattaaaatagacaaaactacctaaataaaaaagaaaaatatgactgttgtgtatttccctacacctacacacatccacaaacactcacatgtacaaaataatttatctataactggatttattagaatgaggaaagctttggctataagaacagctagaaaaacaagaagaaatatgctttatctggatctatggaaacaaagtccattggtttctaacctccatttatttaggcaacaagtgctactcaaatatttatttatttatttctgttctgcacttcatgttagaaaatgctcactttttttttttttttttttttttggaggcagggtctcactttgtttcccaggttggtcttgaaatcctgggatcaagtgatcctcccaccttggcctcccaaagtgctgggattaatggtgtgagccaccacacctggccacttcttcagatatttattgaggacccattacattataggaactatggaggatacaaagataagttattcataggaagtatacaaatactgaactaattccagcacaagtggagtatggttaagttccatgaagatgagggcagtgtagatatcatttagctctgtatctccagtgcctgatattgtgaatagcaaatagtaggttggcaggatgtgtttcatggatatggaatgaaagaataatgccctcaaataatgtagaagttcaaaggaaggagggactacttctgcctggtgttactcagaaaagctttctagatgatgaagtatttgatctgagtctaagggatgatgggatgggttctaacagagagaattcacatatcaggcagaggccatcacactgtcacaaagatagagggaagaaagtgtgagacagcctttaggaatagcaaatcattcagtttggcagttcggcataggaaatcaataaggtgggggtagtgcacagataagactgaaaaattagattgagtccagactgatgaaatccagaaatgccaagttagggagtccagattttattcttgaagaaaactctgactatttgtgttcagatgcctatacaacagcttagccacttgccaaggagtcatcagccttgatcctgcttctgaagatatcagagggagtcatcagaagcacgtcctaattatattaccagctactctccaagaagctactctaagagaaaacctgcaaagtgcagcagtcccagaaaagaagatgaagattaaagaagaaggaggatatttagaaatgattaatgttggtcagtttcatcagttcgaagtctgttatcagatacctgttatatttactatggcactttgaacacaagttactttaattctagtctttgcagacttaatgcacaaatcttaaaaggcaaaaaaagttccaagagaaaatatgccttttaagagacctctaaatatgttataaaatgtagcttctgtctaagaagagactgattctttgaggaaaatggtagagagtaggctccctggatacacagaattgtcccattcattcactgaaaacacacatgaccagaggagctgtaggtaaagttataaaacatgccttgagcaatttacaaggaaattgaaaaaaaagtaccactcttaagtactagaagatttataatatttgactttagcttcttgactatttccattttttagttaagaaagttaagattaaaaggtttaaataacttatccaagcccaaaaaaaaagtagcacagccagaatccatccaaatttgtttgactccagagagcatactctttctcacgtatcacataatagccttagagtctgccctcgtatatggaaaacactctaatgtagtagctaaaagcaggagctctagctaaaagcaagacctaggttataggtcttggctctacctcctgttagctgtctgactttgcacctgttaccaactttttgtgcctccattttctcaactgtaaaatgaggggaaataatatttcttttttttttttttttttttttttttttttttgaggacgagtcttgctcagtcgcccaggctggagggcagtggcgcgatctcggctcactgcaagctccacctcctgggttcacgccattcttccgcctcagcctcccgagtagctggaactacaggtgcccgccaccacgcccggctaatttttttgtatttttagtagagacggggtttcaccttgttagccaggatggtctcgatctcctgacctcatgatcctcccgcctcggcctcccaaaagtgctgggattacaggcatgagccaccgtgcctggccaaaaataatatttcttaaggtaatatttcataatgtaagtccttaccttatagagttgatgtgagatttaaatgagataatacatataaaatgcttaggaaaatggcaggcccaaataaaatgctcattaaaattagctattatttttcagtgaaatttcattataattgcaataatttagacagttcacttcacattttcttgatctcagtcaacacacgaagtcttccttcaatcaaaaagaaatccctggaaaaattttatgcagtcattaatttgtacacaaaggaatatatgaaatgttaatatgggtaaaagtcacaagagtttggttgctttttggaaagacaactcttgctctggtaacttttctgaaactgataaatttcactgattagcacttttgctatctgtttctttcccgacagtacaaaaccccagataagatgacacatttccgtagtctgcaaacttacccatgaatgtaggagatccatatctgagcaggaagacttgagacgtgtgtggcgaatacaagaggagcagtggtcccagggtccaacttgtgctatttggaaatcaagacatgtccagagagggttttcaggaaaaggcttccagtgatgccacatgtaagcttcaccttcataccaagctaatttatcttccaagttgcagttatttaaagtgctggatctacccagtgatgcagaaagagtatccaatctaatctccatttcttccttcctcctcgtgctaacactattcactttcttttctcgggacttggttaatttcaaacaagaaatcaacgtgtcatcttcatcttctgaatgacaaagaaataggttaaaaactatgattataattcttcacatataggaattattcttccatttatataagagaaataaatacactgcaatggataaaccaagaagtcattcaattttataaaattatttacagcagcatttatttaaaaagcaagttattttgctatataaaattttttgttttgtaaaagtcgcatttttctgacatttttgaaaccataacaattgattaaattctatctcactggaaagaatggaggccacatacaaataatatgctgaaagatatttgagaaaaaaatacaattaaaaaacccacctcttatgtttctattcttaaatatttttttaatttttaaggtcatgtgtataataaagaattataaggaaataaataaaattatttgccctacttaaaagaataaaatctcagtggtttggactgaaatcctactgacattctgaaattgtctattttaatatcaatctaccaagagatgtatggatgcagtgtgtctcacagtgaaatggttttcaaaaaacaagaacgacaaaaatttaaaaaagccatatctgtaataccataaagttcatttgtgagatctatatttacacaatgtggcaaagactctgatgaaatttctagtaatgtagaaaacagttacagaaaatagaaatatatatcacccagagtcaattgctctatgtcatggaatccctttaaatccaaacgtttaatgggtatttttaaaagagttcgattacttaaggcatgctattataaataaataaatgaaaatcaaagttgcatgccatggacataccaatttgttatgcttacatcaaaattcaaatacattgttttctatggccaaggaatggcgacagtggacactgctgagcttcctccattgctctctctcactgtgtctcggagcccggtcttgaaggcaaggagaaacggggcggtgcataaatacggggtaaaattcaggaacagatggggatgtctgttttaaaataacttggcaataaaaaaaaatcctcaatgtttaatgattatcttaagactttatcaaaatgggcttcattaacgtatgcttccttagttctccctcaaaggagttttaacagcttattgagttcttacttacggaggtttattaatgtcggtttcacctcatccagattctgcactctggctttcttagtccaaaccagtttctgtagtcgctttaatgtccccattgattccacagggtcactgcctgattttatggcctagcacaaacacagctcaaggtaaagacaaattattcctcacaaaagattaaatataaaatatgttgagatcataaatgtggaaaaattaataatgtgaccttaaaacctgaagcctgagtcaatttaagcactaacttgaaagcacaccatactttttgggttcaaaattataaaatatgttacaactggccaggcatactaaagcagagtggttttaccattttttttttttacttcaaaatacagcaaaatggattgaattcagaaatatctataaatgactcactcctgcccactgtgaaacagcggaaaaaaacaagatctttgcagtgtaatatagatggaacaagaggttcaaagttgctatttgctagtattggaatagactgatagtatacaaagtctacctgctaatattagataaagcagaatttaaatagtcttcattttctttttggaaatttgtggacaaacaacatttgtttcaagtatgaaaatttttcaaataacatacttttaaaaaaatagcctcttgctttctagaagatatgcactaagtgaaacaaaagatagccacagcataccacatcatgttttagaatatgtgtcacttgtttattatgacaaaatatggacaaaatataattaacattgcattaatgactcttgttttctttaaaagattcaggaatgtttcccactagtttactgttgaatttgtatttatacagcttttacttattatcttaagtatagttcctcttaaggatttcaaaatactttggaaattaactctttgtgtgctaagttttataggaattgataaaaatcattgtgttctgttgaattcactagatgtgatgtaatacatataggaatactttttcatccagaaagttctagactcagaaatatttctccacctgcttttgtctcattctttccattgaacagctgataaatagcatctacaaagacactgcagttttcaagaggtgaatatttgcttcctcattaatgtttgaatgagacatatttataataatgctttccaatccttttaaggagactataagcccaaataaatgtttggaagtaaaggatatctgacatgcaacatttccaatctttatactcagctgttatctttgttctttaagaatgactttgcacaaccagtataaacttgttgatctgtctctgcaaaatagcacttacgtaggaaatgtgacgtttttgtcagaggaaccctacctttttgcattaaataagtgggaaaatattgaaatcattttaatctttcagaaaggactgtgatgagatatgcttagaagcacaaaatcttccctctctttccaaaggccatgctctgctcaacacaatttctattgctgtttatttttttgtattatttctcagtgtttcttttagtgctttctgagttacttgattttatagaccctttacaactcaggaaaggccattttctactctttagaccctttcagaaataataagatgacattgcacaaccattttttctttgttgtgcttctattcttatggcaacttcttgttacagccaaagcttaattgctccactgaaacactggcaacaaaaatcgtcttctcttctccctttgtgaaaaaggctttcacttaatgtggagaaaggtattatataccagggaaatggaactttgtataaatgattttcccccaagaggaactaaagcatttggaaggtatctgaattcaggtaagtaagatctcatgtcctagaggttttaaaacaaactgacctttcattattttgttcacattctattgtagcctttttaaagcatgatattgttaatttttgtatctttattcactttgagttactggacatcagtctactgcattttatttatttttaaaaatcctatgtgcctaggattgtacatggcttaataaatatgtactgaatgtaaatacaatcctaattttatacatgttttatatacaaaatggagtatccatagtacatgtttgatactagactcattactttctagtagcaaattatttctggacaacctcctcttgttaataggtactatatatccaagggatgaaatttagagttaatattattataaaaggtatagaatcattacaactatgtattaaaaagaaaatgtattcagattaaaaatacagccaggtgcagcagctcatgcctgtaatcccagcactttgggaggctgaggtgggcggatcatgaggtcaggagatggagaccatcctggccaacatggtgaaaccctgtttctactaaaaatacaaaaatcagctgggtgtggtggcatgcacctgtgatcccagctacttgggaggctgaggcaggagaattgcttgaacccgggaggcagagattgcagtgagccgagatcgcaccactgaactccagcctgggtgacagaacgagactccatctcaaaaaaaaaaaaaaaagaaaaagaaaaaaaaagaaaaatcctcaaatatttttcaaataataaccctatttatctcaattctcttatccattacctacatatttgtactgaatgtgattgattaagttttatagtaacataccttttaaattttaaatgtgttctaagaagattaacccataaattaaacctagcattcaacaaatcaataaacttttatttgagcacctagtaaatgccaagcactatctcacattctggggatatggcatagaggaagtaatatgagatcacagtttttatcaagtctaattctagagggaggtgacaggcgataaacatataaacaagtatataaacataagaatgtgacataagaaatgctgtattaataattaacagggtgattagtgaggatgcaaaaagagggtttattaatatactgatcaggaggagcttcactgaagatactaaagctgaggcctgaatgatgagaaggaaccagatatgtgaagatttagagagggtttagaattcagcagatggtcagaaagaatatttcacctgagacttgcattggagaaaaagtcagccaggcaagtagcagagagaagagaagtcttggaacacaatacagtttgcaaaggttctaaagctggaatttctggaagaatgcttagtatgtgcccatgaagggaaagaaaggaagagtaccaagagatgagcccagagaataacagagatccttccaggaagcttctgtagagcaggttgaagaatatggaatatctaatcagagggtgatacaacttggtttacagttttgttcttctctctctactgaattttgattttccatttcaatggactcttcccaatagcattcaaatgtgcttcatgttattcatctttacttcaccatcttttatttaccactttttctattcttctttgatcctaggcatttgtatcaaaaatgtgaactatgtatgcttcctttaattctattaacttctcatccttttaatctatctcatctatcagctttcatctctaccattcccttttaattgtcattttgatctaatgagccattcttaaactcctttactatttgatattcagcaatgttgaccacagtgaccttctggaaacactctcttttcttggcttctgtgacaccatgttcctctgattttccttttgccttttttggcccttccctctataactcctatatgctgacaccttccttttcttgaaattaaattttgaaattacttaaggattaaccctggccttttatctgatatcaccaccattctcttctcatgtgcatgcatgcacacataccacttttaatatcacttatatgctaatgactcccaatttatttctttccccaggcctctctgcagagcttcagactcacatatccaactatgtatttaaaacaatttttttgttgttttatccatcaccttatttatttatttatttattttttaaattttttttattacactttaagttttagggtacatgtgcacattgtgcaggttagttacatatgtatacatgtgccatgctggtgcgctgcattaggtatatctcccaatgctatccctcccccctccccccaccccgcaacagtccccagagtgtgatattccccttcctgtgtccatgtgatctcattgttcaattcccacctatgagtgagaatatgcggtgtttggttttttgttcttgcgatagtttactgagaatgatgatttccaatttcatccatgtccctacaaaggacatgaactcatcattttttatggctgcatagtattccatggtgtatatgtgccatattttcttaatccagtctatcattgttggacatttgggttggttccaagtctttgctattgtgaataatgccgcaataaacatacgtgtgcatgtgtctttatagcagcatgatttatagtcctttgggtatatacccagtaatgggatggctgggtcaaatggtatttctagttctagatccctgaggaatcggcacactgacttccacaatggttgaactagtttacagtcccaccaacagtgtaaaagtgttcctatttctccacatcctctccagcacctgttgtttcctgactttttaatgatcgccattctaactggtgtgagatggtatctcattgtggttttgatttgcatttctctgatggccagtgatgatgagcattttttcatgtgttttttggctgcataaatgtcttcttttgagaagtatctgttcatgtcctttgcccactaagcacagtcagaactgacctctagaactatgctccaaatatgatgctcatcccatcttcttcaactcagtgaaggccatcttcatccacccaagtgcacattccataactaagagtttcatctattctatcttcaaaatgtatcttgaatgtccataactaagagtttcgtctattctatctccaaaatgtatcttgaatgtttctttttctccatctctattgttaccaatctagtttaattttctttcattgaaactactgtcaagtctctaattggttttcttttcacttttgtctttgtaatttagagtcttctttgaaagatataaatttccatcaaaatggtaattatatgttaatgtaaatgtaatttttcatatgtatatatttaacatgtatatactatgtatttcatatatttgtgtctataaacagaaatatcttttagttcattttgctcactcttccttaagtaatacaaaaattttgttagaagtgcttggttaaatatatctcattttcagacactttgcttgaatattaatattagagaatactttttagaagatagcatcaatgaattattgaactggattagtcctacgatcatattttatgagctaggatggaaattattagacatctagtctaccaggctatataaaaaatgagaaaactcagagaagttaagtggcttactcaaggaaagataatttattaataatagagttgggatggaaatcaagtattctgacttttaatccaatgttctttcttacaagatctttaaatgccagcataattactagttatctagtattgacagccaaattaagaccaaccaaattcagggaatttatttggaggttaaatatggctttccaaaacagaggataagtatcaggtactttcagatttataggcctatcctcttaaatatacataattaagaaggaaatatataaatatatgtgtgtgtacgtatgtatatacctacatatatttgctggaaaggcatttaaagcttttaaatctctcttgattttatcacttccttttaaagaaggaaaatttaggcttatggagactaacaaaatccagattgcgttatctgtctgaattatgttctctttactccactaatgaaaagatagctgaataacacgtcagacttgaatgaagtaaaaaacaaaacaaaacaaagcagaaaaccctttgtttttgctcttcttcttaatttctgatttggaaaaattttcctctctagtgtcatatttaacaaatattcaaataacaaatcctaataacctgatgtctatctcacataatttcttcaacaggagaaatggagtttttcaaaaattaatattttggtttatttttaaagaaaactgtaatggaaaccgaaacttcaagtagtttcatatgtatcacattgacagttttctctaagttttccggtcttatgactcgttgtttcattattaaaactgtgccagtgtatgcatagggcttagaaattttttaatgctcccatgtattaagtgaaaaaccagaatgtaaatttgtataaaaagtacaaacaccattatatgtggcctttttctatctttatatattctactcttcttagttttctacagtgaagatgtgttagttttgtaattagcataattgggagaatttttttttcttttaagacacagggtcttggtcttgctctgtccaccaagctggaggctggcgtgcatttgcatgataagaacttactgtagctttgaactcctgagctcaggaggtcctcccatcttagcctcccaaagccctgggactacaggcacgcaccatcatgcccggtaatttattttattttattttttgtagagatgaagtctcactatgttgcccaggcttgtcttgaactcctggctttaaccaatcctcctgcttcagcctcccaaagtgctggaattacaggcgtgagccatcacatgtgggaagaaattctataaacaactacaaaatgtatttagaaggcagatttcaataatccaatctatccttgctaaggacagaagtattcaattttttctactggtaatttgttcttagccacttgaatgggaaggtgcttagagacaggaagaagagagctactttcatggtaaaacaaaataaagaagaggttttaaatgttgaattattaaacccctaaatctatatcttcatttcctcctatataaaagtgactagtctctattcatgacctaaaacatattctaaaaagataatttttaaggtcacaatgatcaataaacatttagaaactcaatggacagtaataaaaccaatgggattatgaactagaattgatcaatgcaaacacatgaaaacaaatacatttcacttcagaggtttattttattgctttcttggaaatacaattaattaaaaagacaatttaagataatttatgcaaatgaaatattgattgaagaaataattacagttggtgggaaaattgccatgttgacattagatattcgtatatcattataattttaaaaattattatttttcagtgatagaaactgaacttaaactaagattggaaaaacacaataaagctaggcaaaattttaagtcatcaaataaatgagtaattgaatgaattagttaataaaatcaaatatattctcctggaaggcttataagacatttatttattcatttatcagatgaggacctaatttattactgaggacctaatctacgggaggtgcaaagaagaatgaaatattgtgtctgcctgtgatgcacattgcttaatatgaatactaagaaaaatagtcatctgtttctgttcctgtccccctcactgcaaggtgatttctttggggttctagtactgttttacacatatcacttcctagagtcagtatggtcaataaatacattcaatctcaacagcaggccaaaaatacatctggaggaaaaagtagatgtgtcatatgagaactacaaataaaattcaatgattattcacaggagaaagattgcataaggtgagagtagggagaagaaatgtgcttggctagaggattagcaggtatttaagaagctaagcagtataatttaggttatctaacaaagccatttatgtaatagtcttattccactgtaaaaacactaaaaccctttcaagtcctaacatgatattctagctcctccttcctctcaagcagattttgatgtgcataattctggttttggaataacatgccctctgagaacacagtaaaaaaagaaaggagtctttcagaagccacacaggcccaattttccatagtataatgaagtcgcaatgtcactgccatttctccacttctgcaggggaagccaagactgctttttgctcactgacctatagctttgggtcagtctttgaatgtggacacactgccaagctagctgggagttgccaggattacacaaaccagcattgcaaatgggggttgtgttgatttaagagaaaaggccacagaagccacatctttcttacttcctgcgtaatatcctctgctctgaaattttgaagaagtttctagaactactcataagaacatttctgtttctgggtacacctcctagctgaccaaaaattatgaacaataggaaatttaagagccagtatgcaaattaattaatttttattaagtatctattggattcttagcaagaagaggagctatgaatggaaaattacacagtaaaaaaacatttttatctaatatttatttcatatacacaagaaatgttaagaaaacctagagtaagaacctgcccttgtgtgccgactaatgattgttctgctttgaaaatctgctttgtgactggccatgtgaacttgagtgagccacttctcctctctgcacttcagcccttcatctttaaattgaaggattggatcacaggaattcattgttcctcaaatatccttggggacatttgactacataagtatcttcttttgttactttacataaattcttgagccttagaaaaatatcaaggaaaaagtgagaatgacctactgttaatcacagattatcagagtctaaagaaatattctctactccaacattttacttcaaaaatgtggaaacggaaatgcagaaatacgaattaagtggcctaagagcacagtccgtggtagagccaagtcctgcaatctagttctcttgcttctgtttctaattaaggaatttcataatcctcccaaatgtatagctttattttcatctgaaagtcctgttagtatttactgaggttcatttgtttgtttcccacagctttttgatatttaactagtcattaaaaactcagatagcatgagaaatagcaagggcagatctcaataattttcttttagggaacagaagtaatatttaaatcataactttccatcacctcttcctcctacctagcacaacttagacatctcttagacaaaaaaatacatatagttgaaaagaaaactattataaaaacttagatgttaataacatgttaataatattggggaagagagagctataaataaagatatcaaaacttttgtattcatacctacataaagaaacatgatttactaagagtagttatttctcacaaaattacagttacattttgggaagcaatggtcaaataagttgcaaacattagcttgtagtgttctgaagccatctagaacaagaactacaaataggacttatagttgtttcatatcaataatgctataatacttgttgatgtatgtgaatatcctggaaatttgcctgaccttctaaaacatgtcctttccatgaacttctgtttagcaatatctcaacaaggaaaggaaggcagttgatgtgattttaatatcataagggagagctggcacacagagatactttttaaaaaatggttttactatatttcattctatggactataatccaattaattacttgatttccttttatggcatactcatgctgtttccaagttctcttttttagcaatgctataatgatgtacacttctcccagaaacatgggataacacctatttcccccaaaatcagacgacatgctttttaacattataaattttttcctatctcaggaaaaattgctaaattttagggaaaattttttatataacaacctttccttctttgaaggaaatgctttatgttccttttagttcagaaaaccactcagtaaggacaagcctctatttatgttctttagaaacacttccatgtggcagctgaaaacagaagtaataaagaactatagaaaacagtgcttgtggcattaaaatgagtggaaaagagatgggaaatccacttaaatagttacatctgggaagaaatgtctcaccagttcatcaacagtggtctcaacatgtctttgatagtgaaatggactccaacattcagaggtcaccttagaaattagaaaaggaaatagagacaactaatgttaacattctttaaaaaacaaaacaaaaaaactccacaaagctaccaaactaattgggaaaggattcgctgtcttaattagaaataattatcttgttatcaaagtacactgattaatgtttcatcagtgacttcatctgcatatatacacatatatagacaaatatggaatatgtgtatgtatacatagtatatacacattatatatccatatatgtgtgtgtgatatgtgtatgtgtctatgtgtattagattcactcctcagccctcacatagagcaattccaatccatgatctcacatttagaagggttggtggaaaggggggatcccgaatgttttatgaagcagcccactctaatcccttagtgctctacattattaggtacacaatggacatccattttagatactctaattgagtttaaactcaagccaaatacacatttggattaatatctcaagtcatagtgtgggatgtcttttattacatttggtacctgtcagtgtaaccttctaactgtcagcttctactccttttgaaaactttatgtacctgatatcaaacaatttctacctagggcacttcaggactgcagcaaagggcatttgatggagtctataacaggtaataaaatggtgctgtggtctgaatatttgtgttgcccccaaattaatatgttggaatgtaatacacaatatgatagtgtattagtccattttcacattgctgtgaagaaatacctaagactgggtaatttacaaagaaaagaagtgcaatttgcacacagttctacaggctgtacaagaaacatagtggcttctgctgtaggggaggcctcaggaagcctccagtcatggtggaaggcaaagggggagcaggttttcttacatttcaggagcaagagcaaaagaatgaaggcggaggggctacacacttgtaaacaaccagatctcatgagaactcacttactgtcatgagaacagctccaatgggttaatgctaaaccattcatgagaaatccaatcccatgatctaatcacctcctaccaggccccacctacaacaccaggaaccacagttcaacaggagatttgggcaggaacacttacacaaattatatcagattgtattaagaggtggggcttttgcggaagtaactaagtcatgagggccctcatgaatggaattagagcccttataaaagtggttgaggggagctgccttgctccctttttgaagcagacactgaatctgctggtgccttgtcttggacttctcagcctctagagctgtgggaaatatgtttctgtttttacaaattacccagcctaaggtactttgctatagctgcctgaaagaactaagacaaaggtgatttcaaattttattctgaggagagtctgcaatgagattaagaggaatttagagacagggaaatatgaatattcattaaacatcttgagggagtatgctcctttatttaaatatttatgacaatcgcaagaagttttattgtcactattttacacataaggaaattgaagcacagagagtttaagcaacaagtttaaagtccagtgtttttactcatataaatgtaaggcaagtttggtttccataaagtctaaaccccagcagaattctggagttctagcacacaaaatatagccaaagagcaagaggtttgaagcagaaaactgacaaagtagctgaagtgactgcaacaagtactaagtggttggattttatttttgacacagtatataagagtgcatttactagccattttctgggctgcgaaattcctttttaaaaatgcatgagaatgatgctaaggaataccaaataagtcctctcaatcttttagggaaatcaaaaagtaaaacacccatacatttatggagttcattcataaaaattatttgttagaatcaagtatttcctcttttttaaataaaagctaaatgtagagttgcttaaactctcttctttaaacgtgaaagtacacatcattaatgcagtataacttcggataaggaaatgagagaatccaatatgatcttaattttatttcaccggaaacaagagatttgcattccattttaataacctgtttctttaataccaacaaaagccactcttgaaagtcttctactattaaagaggagattagattttttttcaagataacgaaatatagccctatattctttctacctgcaaaataagttataatcctgctctttggaagtagaaaacttctctgtctataacctcaaaatactattaggtagttctagtggttttaaaatacactcacaaattcttttacactgaagaggtcttcagaaggtggaacctaagactgcccctcacccttagtgtgagctggatttagtgagttgcttctaacaaatagaataaaatggaagtgatgatgtttaacttctgaaattagatcttaaaaggaattgtggcctcttcttgttctgtgtcttagatactcactctggggaaaccagatgacattctgcgaagacactcagcctcatggatagaccaaagtggcaagggacctatccctgcagtcaattcccataaaaaaactgaggtcacctacctatagccatgagagggagttagaaacaaacctttcagccccagtcaagccttcagataacaccttgagcgacactaaccacctgagattataaccacatgagagactctaagctagaaatgcccagctataccactccccaactcctgacccacagggactgtgaaataattttttttgtttgttttaagcccctaaattttaaagtaatttgttatgcgtcaatagatttgtaatacaatagttaaaagtcatataatggataagaaagtacttgaaataagaaacattgatcaatacacaatatcattattttgtcataatataatcatgtcatacataaagactatcatttggttgacactgtcattttggactctttttgtttgtttgttttcccccttttagattgttcacacttttgtttagaactccctcaaatctgtctgataaaacctagtgaaagacctgtctctcctgcttgttaatatatcacagcataaccttaaattatttctccagtgacccagcgttgtgacctcagttaagctcatgaaaaattggtcccattttgtccattctacacgcatctcccaaaaattgtgtgctatgttggatacagttttaattctgtacatagccaatgggatgtgtatggccaatattttatttgttagtaatccaattttcatcttaaggactaaatgactaactctaaatgctggttacactacatgagaactgaaggaggctagtttagtttgtgcaataagaggtgagtctagacactgtttaactgtggacacagttttgtctgattgcttacatagagcagagtttagcattagcaaaagtgattgttttaaaaataaggtatcagaaatgtattcggctttgaggaagagaataaccaacagtggtggcttaaacaagtatggggcttatgtttctgtaaaatagaagtgcagacatagggtttccaacccgggtgccgcttctcaaggatgtcctcagtgaatcaggctctatgcatgtgcctgttccaccatccttcatgtgtgcctttgcctcacggctggaagacagctgctgacttaccaggtattacatccagctccaggcaggaaagagagcaaaaaacaaagctttatcctcatgagactctgccttattttttttattttccagaaaagaaagtcctcctctggaatttctgactatatttcattggccacaactggattccatggccacccctaactactggggaggctgagaattcaaatgctgaaaattgcaatctccatagtgaaagacacgaagaaagaaattgattgaaatgggttaattaattcaattagcaacactttttctcagcaaaggagctgagaaagaaaatgttttggttcagtcctgggtaggggtgcttgacagtgcttaatatcaccagcactgaaggtaataaatattatctctcttttctatcatgaatatgaatgatactctgaaggctgaatgcaacctcagaatttaagtgagaaatgaggcatgcaacacttttgaaaatatattagcccaaagtctgtattactgcatattttattccccttttaatatgctacaaaaggtttgagccatcagctgaatgctgccagagaagaacaaacaagaacaagaatgcaaaaataaatgctgggagtcaagttttcccaagatgttctttatagttggtgtatgatcacatttctaagcagactgctttgcttcaagctctacccatcagcacttcttccacaagcctggttctccaggaagtttatcccgggctaactatgcagaaatatacgtggggcaaagtgggtactggagaaagcattccatgaactccttcttttgccctgctacctgattctgtgtaacttcttccatgcctgagatcttctcttccattttgagaacatgaaggaaacatgtttgcttaagtacgttctggttgggaattaaatatttaattctgatcatttttagtgtctgaaatatatttcgtaagcatggtcatatgataattataactataaaatgttttacattctacaaactttatcccatgttactaatattcaggaaatgatcataggaaaatatttgcactaggatactattcattattttaactctttctatttatacatagttttaagaaattctacaatgaatttatatcatcttcataatagggaacaaaaataaacttcactttttccatgaggctgttgtcttccaagaccatacctaagccaagtttgggtttataaagtcaaaatcatgagatatcccatctgtgaacaaatactcatggctataatttggacgtttgttgtttccaaacttcatgttgaaatttgaccctcaatattggatgtggggtgatatggtttcattgtgtcctcacaaaaaatctcatcttgaattgtaatccccataattcccacgtgtcaagggcgggatcagatggaggtaactggatcatggaggcagtttcccccatgctgctgtcataataatgagtgactctcatgagatctgatggttttataagcatctggcattgcccttgcttgcactcacttcatcctgccaccctgtgaagaaggtgcctgcttctccttagccttctgccatggttgtaagtttcctgaggcctccccagcaaggcaaaactgtgagtcaattaaacctctttcctttataaattacttagcctcgggtatttcttcataacattgtgagagaggactaatacatggggcctaatggcaggtgtttgggttatggggctgaatccttctacaataggttaatgttctccctcagtggtgagttctcactctattagttcctgcgagagccagttgtttcaaagagctaggggtgcacctctccctgccttgcttcctcttttgccttggaatctctgggtccccttcaccttcagccatgagtggaagcagcctgagaccttcaccaaatgcagatgcccaatcttgaactttccagccatcataattgtgacccaaataaacctttttctttataaactacccggtctcaagtatttctttattttgtttttattattgtttctttattttgtgttgtattattgcaacacaaaatggactaagacactcaccaactctcttgaattcaagagtttcatggtttgtgtactgaatattgtcacataaaaataccacttcctaggctccagtcatgacgatccaggtgaacaggagtatggcaccaaagtctgcctttttaagtaatactccagttgaggctgatacagacagttctcagatacacttggaaaaacacttatctgatagtcatttgttcactgatggaaggccaagtttcatgccatagtccactcttatgcacactgacaagccactttgctactcacaccagcttctccatttgacagtggctgcctctcttccccatctttcaacagatagtttgcatctccttctcctcagtcacaaggagttaataaattaatattttgcataacactctttgttaaactattctgtcatatagataagtgtttcttagttaaattcaattgaatgtctactgtgaataaaatttagataagaccagtgcctactcccaaacgacgatttttagattagatggctcctgcttgtctgtcactaggtatgaattccttcgatctttagtgatacactacatgtcacagttgaatggttaccatttggaagcaccatttcttgcccaattttaaccttcagaagcattgttgttagggtaaagatttatctttaaccattttattcaaagaactttctatgttactttcttctttccacgaaacgggtctatttttctacgaaaaacctacagaaggatttcctcttggcagaaggcatgtctagtgagctattccagtaaaccagctgttatttttctcctggccagcagacaatgcttcacttagatattatatctgaggtctcatctgaatttaggaaaatgagactgcttgtttcagagataatcttccagctgtgcttgtgcaagtcttattaagcccttgaaagagtaagaggagaaggagggtgagggagaagaggaagaaaagaggaggagcaatgacaacaaatgaatttttgaaagtatgtcttaactaccagacatagaactatagtgttttaatgacaggtctcactgaatcccatgaaagtactgagatattttttatagatgtattttacagatgataaaaacagaggcagagagagtctaagtaaattgcacaatgccacatagctactaacagtcaaagcaagattcaaactgagctctgtctgatatcagagctctcatccatgcactgtgggagaacccactgggagatactacaagggcaatgtgttatcacatcttgtagcataggcctatcactctggtagcatcagagcagtcagcagaaactctagtggatcaaaatcatgatctaccatctaatttattggagggcctccaatagcctcaggaatcaggctggatttaggaatgtgagcccccccttcctcaccaaatcagcactttataattcatatgctatgtaccttctatccactgcaccgaagaagttcagttctaaattttctaatgaaactatcagaatgattaaagagaacctcatggctgtcagagaaaatatcaaaagtcagtctgatgcctgaattggccttgttgactcatatatcctctcttgttacagggtgaatagcaagtatttggccattgattaatgttacattactattattagtgaggccaaacattcagacttttttaattatccaaactcctgggctaattaatgcagttttgaaagggattggtcaggactcacagtttatgtttttatataagtgtttagcataggtcttgacaggaacatcccagtatattaatttaatattcccagagttacttatcaaaaggctgtacaacatgatgttttgcaaaatcaaaatagtttattatcttatcatcattgaatttttttcatttatatttcaattcacagggacataagcatatcaattataaagcaacctataataactaaatagaaactagctaaaaggctgtgtaagtattgtacactatgcctaatatattacagagctgagtaacaagacgattttcacaaaacacgcaaatgctgattattcacattacctgataggaagttccttgtagagtttttccttgataggtatgtatgttgttacttagaaaatcatcttcatttagatctaagaaaagagataactgttacatacagaatatcagacattacaggatttaggaagtttcggtgcaatttaacactcatgtttttatttagtctgtaagacattacattggctacgtcaaaaatatttttttttgttaaatatatgctatttttctttttttttaacaagaaacagatcaaaataaaatagaaatttaacaaaatagggatgccgctgaccatctgtgtccctgaggaagtgatggaaattcactgtgactccctttcttggtaataataggattgtggactagctacaaaagccacttctaacttcaacatgctatgactccatgcagttatcacctcacctgtttctattaaactaagctttccacccctggcattttgagcttcattagcttaggtcttctcaacatgaattatttatgttgaaattgttctatgcatgctttagtgaaagctttgcaatgtagcatccatttgcttgcagctaaatgaaaccttttcaaatgcagcagcacttcccttttagctcctgcaaatgggagcttcatttatttaagtctgaaatatatggtatgttaaaagaggacaagactttatgggtcacttaatccaagcctcttattttacagataaggagagtgcaacccaacatcacctggtcagcagaccagggccgtttcctttcactttcactcctatttacttgcaaccattgcttcagttttctactattcctcattctcatattctgcagtggaagcagggacaggcaagtcctatcctccatgcacagtgataaataggtgcagatttttctccagatctccatcatagctatagttaaaagatatgttaaattcacagctcagtctcaaagttatttgcaccaataacttaatatttaaaatgagagtaaccatacaacagaattccagaaagtacctaaattttaaactgagctgattttttgatctggttctttgaatcaagaatttatgtcacagggtcaggctgctagaagctgagcttttgcagcttggtttttagtttctgaactgggaaaaaaaaatattgcctcccctcttattcctttccatcttgtctcttttagtcacctttttacaggaattttgaatgactccttctataagcattcttctaggtgtagaaaaagaacagtaaagtggcctcctgtgttctagaatctggaatcaagctgagaaaataagatacgaatatgtgcaatgcactttcataacaacacaaggcagaaaaatgagtgattcacacacaatactatggagagagaccactatgactcagagaacttgtggaagagacaaggccagaatggaagcttgaagaatggatacagtttgaaaaagtggaaggaaaggaaaaggtgtaaatatagcagtgattccatgaaccctggcctattatgcagcataaacggaacatgtttaattaagtgtagagattgaggctggttaggccagagggcaattctggatatagagtaagaggaggtagggctggataggtgactgaggccaaattgtaatgggccctgagtaccagatggaagaatttgggcataaaccattagaccaatgttgtaaatataaatatctacaggaatcaaatatataactaaatgaagttaattagatcaagaaggcaatgggaattctacagtgagcttaaaatccagctccacagctaaagagtagccatggctctgagctctctcagttgaagtcacctgagactttgggtcctggattggaaatttccctcatgtttttcaaggatatacaaatatacggattttaatgtaaaatttcctgatttttaaaacgccatatggccccaaacaagcttttcttctgaataaattcagctatagaggtaccattttacagcccctgctgtaaaaaatgggggacctttaagggctgggactaaattaggcacacttaaacctttggtgtctggtcttacacgtttttgtttatttatgattcccaaatattactctccaaaaatgttttataaagacagaatctatttggtcctaagtagcagcaaaggcaggagttgaattagacaatatgcaggctatattttccaaagttggccacaaccatgcctcccattccgtgtgtttttttgcaaagtgactttcccattccatcaagaaatggagtctaattcttctcctgttgactctggggtgatcttagtgactcacttgtcacagtagagtgcagtggaagtaatattttgtgacttccaaggttaggttaaagaagccttgtataagccgggggcagtggaggacctatatcccagctgcttgggacgctgaggcagaggaatgcttgaggccaggagtttcagatcagcttgggcaacagagtgaggccttgtctcaaaaagcaaaaaaacaaaaaaacaattacaaaacaagaaaccttgcagcttctaccttgggttcttgggatgttcattccttgatgcttcttcctgtgatgtgtgaagctcccttgaatgttgcacacacttgaaacccaaccctgaggctgggagaagatggagtgacatgaaaaggccacatacatgttctgtagttggctgcccggctgagccgggcctaacctagactagttgtcagacatgtaagtgaaggagcctctgtatgactccagctaccagatgtcgaagtcctccccagtcattcaagtcttcccaaatgaagcctcagacatcacattgtgaaccagttccccaaatgaattactgatctgcaagtgtgtgagcctaataagatgttcttttatactactaactattggaatggtttgtttgccacaatagattatcagaacatgcatgaactacatggtagattaccaacatcaatgtgcataaaaatatgccatccagcataaaaattgagattacaagtgcccttcaaatacagaggcagcaagggatgatgtaaaaaagtttttatttctaatcagcttttaggttattctagcatagatacttctgaccatattaattttcaaataggcaaccataatctcaggaagaactcctctgaagaactgaaggatcctaagattcatttgtataaaacactagaagtctaagtggtctcatcgttgaattcagaaagccttcctcggctatatgaggcatcacaccatgcagtgggtaccctttcctcagggagtttattcccatcttgtaagcaagcatttagaggtatgaagtaggacttccctctggtattcctcatgtagtctagtttggccagagttaaattacctgctcttaggaaacaagtttttctaaaattaaatgtgtgtttcctgaaaattaaccagaatggtgaatatatttgtgaatttataccatcttttgccatcttaaaattaagctacttggcatcagaccaacaaagaaaaataattaataagatcttgaaaaattaagccaaaatatttatatgcttacattgaagaggctggccaaatgatattgactagaattcaggagagaaattaggtttcaaaccaatggtaattcaaatggtggactagagtagaaggccttaagaacacctcttctttcccactgggttcctccttttataattaatctcattaagccatatgtaaagaagatttatttatttatttatttatttatttatttatttatttatttatttttttgagatggagtctcactctgtcgcccaggctggagtgcagtggcgcgatctgggttcactgcaagctccgcctcccaggttcacgccattctccttcctcagcctccctagtagctgggactacaggcgcccgccaccacgcccggctaattttttgtatttttgtagagacggggtttcactgtgttagccaggatggtcttgatctcctgacctcatgatccgcccgcctcggctgcccaaagtgctgggattacaggcgtgaaccactgcgcccggtcaagaagatttatttttaaagtaagtttgcagcagtatagatgaagttaatgtttctcttattactaacattgttttctgactttgtctggtccctcacttcccttactaacatatgccatttttccccagctttttcttgtggaatagtctgtcacagttacactgattgattgaaaaatttctgaatctccaaatatgttttgtttcctttttattattttttaaatgttgatttatttttattctttgtactttctggtataaaatatgaaaactctgttcttgaaattatctttaattaaatcataacttaatcttaggtaaactccaattcacagattcaaaagtttgttcttctcaattcttttttataaactcaagtcaaaataaatttaaatattttaaaatggactttaacttactaaaataaatattataaatattcttcctatctatgatgctgaaaatttaacaattaacctgaattatagattaatttctcctcacacctaagctatgccaattttttagttgtaaagtcctaagcattcaatttattctacattattttacagatgtagtctcttttaatagaacagatgtaggcttagataaaaatctccttagaagaaggaaatggactagataaactaaaaatattttgcatctggaactcagcttattctgataaatttggtcttaacctatatagtacagtcatgttgttgagctatggattaatacatcagacagaaatcttagctaaatatagcctatggaattttttcatcaggtcccaatactctttagggctgaaatgctattaatataatgtgttaatgtagaaatatcattttgaaattgaaattgaggaaaattactttttttggccttgaattttataagattgcttaggagttaatgtcactcctacagtttatttccctatatattttcttctattttattgaagccatctttacaatttcattagtatctaataaaatcatgtgggttgtggatgacagcaatgatgtactttcctatctttatctcactgaactccacagactgcctatcctcaggcacaggaaactactcttaagtagttatgcaattaacagctaaaaaggagtgtttaaaatgagaaagaaatattttaggttgatacataggtcactaattacttagaaatactctgagccttccaaatgaaaccactatacccataaaatttgagcctacaacttgtggtcttgaatttctcccttcaatttataatgttacagacagccttggtctctggccatcaactcttcctagcatggcattaatttctaggaaatgtccagtgactcaactgctactactgaaatgtctgctgaggttcttggacacacacatgcacacgcactcgctgaacatgcatggtcactcaagaccctgagaaatatcaaagctgggaaaaattctgtaaagcctttctttcttccttctctgacaaagcaaccagaagtaactcatctaaggtcaggattctttgctgctttttcagtgtagctataatagaattccgtgcctattattcccaaattaacaaaacaaaacaaaaacatacataagagaaaggtagttttaggaaatagaatgcttgaagaaatttatggaaaaatttacatctaaaataatctgtaacaccattataccttctttatccatagatcaacatacaataatctaaaatacaacatgtgcttatagaaggattaatagataaatggaatggcggatgaatagagaaactgatagacaaatgtttgattaactgactgaaggtgtggatgcatatagctggcatccatgtggtaaagacagagtccaatccaaacatgatagagagggaagtggagcaaagtggctgaatagaaccctcagtaatcatccctctcacaggaataccaacttgaatggctattcacacaagagagcacctccataagtaactaaaaatgaggtgagtgatcacaatacctggttctaacatcatatccttgaaagagccactaaaaaaagtaggaaaggtggttttggattgctgactccaccctcctcctctatctcctggtagcatcctcatggtgctgagagagaatatttgtgcttggggaagggagagcaaagttattgtgggactttgcattgacctcagtgctgtttctcacagtggaaagcaacacagggcaaaattcagctgtccactacagggggagcatatagacttgcccccacattctgactagcccctccacagtgggctgaagcactttggggtcctaagtaaacttgaaaggcagtccagacaacagggcctgaaattcctgggcaattcctggtgctgtgctgggctcaaagccagtggaactgaggtgcacatgatctagtaagatatcagcaggagtggccaaagggatgctttcatcacccctttcccaatcccaggcagcacagcttgcagcctcgggagagactccttccttctgcataaggagaggacacaggagagtgaaaggactttgtcttgcagccacagtagaatagggcactaggcaaactcctaaggttcccaatccattcttcactcccaggtgaaatttctagactcttgaatcatcaatagctaaaataatcaatttttttctcattccaataacacttgggggtgaataccaagcagatcaacttttgatacggtttttcatctttgtaaactcttaagactttctgttttattacttgccttcccaaagttaagtacttttaattatgaaattacatactattaatatgttattctatacctgactcctaatttgctctcctggaaatttttacattataaaatgactccattttatattcataatcaaggttatttctcttaaattttttaagaagacttaaacataactattaacatatcaatgttatctttagagagttttctcgtgctctaatttttaatatattttcaaattttttgtacattaaaactttcagttttcttttcaattgcttatttgcttcagcaggcaacttaaccagattccacttcctttctgtacatgtgtctatgtgatatatatacacatatatatatgtatacatgtatatattaatagtttataataatgcatattctattctatcttatttggttttcctttttaagtagaccataatggtctgcttattttcatggtggaagatgtgaatttttcttacctgccctttaaactactttgggaaaatgcaaagtcagctgaactaaatttagcaattaccttttagctgacagggccttctgatgtgggaatcattcttatgcttgctgtgttcctgccagattttgtcattcacagtttttccttctaaagtgaagcagataattggttagcagaattcatagtaacatttgtccagtaagtataagacatttgaaatcaaaacaagttcagcacaggatttgcaacttggtaagtggtatcttaagagagctctagttctaggtgatgcaggaagtcagggaccccgaacggagggaccggctgaagccatggcagaagaacataaattgtgaagatttcatggacatttattagttccccaaattaatacttttataatttcttacacctggcctgtctttactgcaatctctgaacataaattgtgaagatttcatagacacttatcacttccccaatcaatattcttgtgatttcctatgcctgtctttactttaatctcttaatcctgtcatcttcataaggtgaggatgtatgtcgcctcagaaccctgtgatgattgtgttaactgcacaaattgtttgtagagcatgtgtgtttgaacaatatcaaatctgggcaccttaagaacaggataacagcaattttctgggaacaagggagataaccttaaagtctggctgcctgtgggccgggcatgatggagccatatttctcttattaccaaaaatggataagagaaatatcgctgaattctttccccagtaaggaatattaataattaacagccctgggaaaagaacgcattcccagggcggggcctctaaaatggccaccctaggagtgtctgccttatgtagctatggatagggatgaaacatgccctagtctcctgcagtgcccccaggcttgctaggattaggaaattccagcctggtgaattctagtcagactggttctctgctcttgaaccgtgacaatgcatgcacatcaggacatggaagttcattagtgattctagtttcacccttaacttctgccttgtgatcttttgtcgcccttgaagcatgtgatctctgtgacccacaccctattcgtgcactccctcctctttgaaaattgctaataaaaacctgctgggtttgtggctcgggggcatcacaaaacctgctgacgtgtgatgtctcccacagatacccagctttaaaatttctctcttgtgtactctttccctttatttgtcagactggctgacacttagacaaatagaaaataacacacgttgaattatcggtggcgggttcccccatatcagggagttctagtccttcatggacaacaacaggtatcctgtgggctacccacttattcccatgaactacataggcacttcaccatatatgatagaatgctgttactttaacgtctcttgatagcttatgattgcattattctttgtagttttcttgaattcataaccaattattattacttttctgagacagcgtcttactctgttgcccaggttggagtacagtggtgtgatcatagctcattgtggcctcaaattcctgggccatagctatcctcctgcctcaatttcccaagtagctgaaactacagtcatgtgccaccaggataggcacatttttttttttttgtagagacagggtcatagtcaattgtttttatgcatcctgaaaaggttaaactatccttaccctctagattctccatcatttctaacaaactaattgtgtagaaagaacattgggctgtgatagtttcaagaaactctaagatccttgaatggaatataaatgatttgctcagctttgtcctcccaacatctaaagcagggcctggacatgtgaagaaatgaattgcaccaaatggaaaattggagtcccttctaaattacttactacagataaatcattctacatgttgtatcatgcattgataacacaaatgttgaataatgcaacctatgcatagcatgaagacaaactcagcatgctgtgttgtttctaaagtcactatttgctcatatgttttgattatagaaaaggcagttgatcatcaagaactgtgttaggatagaaatattggttgtactgtatgtgcatgcagaatagactgagaatggatctagatgaaaaataaaatgttgccttgcttccttttatttaagactgtgcactattcaaattagggctgatattcaaaatatttaacaacgagtgactgcaggaccctgataggatccagcgcctatagatgctactgctgggagaattgaaacctgattaaaacgcagatatccttcaaagttgtacccattgtggggtatcactttagtcagaatgagcttttcagatcttaccaggaaattggtttttaaaaaagaatgaaatgagtatgagcacctgactcctctgctggggagaaggaaagggaaaagggtacccataagtttggcacactacattaaaaaaaattattgaggccaggcatggtggctcacacctgtaatcccagcactttgagaggtcgaggcaggcggatcacgaggtcaagagatcgagaccatcctggccaacacagtgaaacctgtctctactaaaaatacaaaaaattagctgggtgtgatggcacgcgcctgtagtcccagctactctgggggctgaggcaggggaattgcttgaacccgggaggcagaggtggcagtgagccaagattgcaccattgcatttccagcccggcaacagagtgagactccgtcttaaaaataactaaataaataaaattattgactggatgatccagatgtttcacattgtgaatgttttataattactgactccctatttgctgtaaagtaaaaagagagataatctattaattttctaaaaataatgaatagaaatcgatttttactttagaattaaggtacaaaccaaactgattgcatgtattattactatgaatgctatcacagaaactaaagagaagatttggtgtgtgaaatgttgtagaagagacttttataatgaaaccactttctgctaattttttattgtctcctagattcacagatctaaaatgatctctaacaagtcaccttgaccacggagcagccaagctacacatggagagctggaagatgagcagccaatgaactaccaaagaggattattctgtttaaatataaacggaaaatattgcaaataaatcaatgatttctttgtcatagccatttaaagttagaatgaagccacttttaaaaaatgttcttctatataattcaaagacaactcaatttgactttcattaatcagttttgttgctttgtggcaggagcaggagaaaagaacttgtggggagacagaatacatcgtttacacttgtaaccttaggaatcactaaccaaatattttattttcagacataaatctccggaataacctggaagaataaaagaaaaagatatttaagtctagatttaataaataacattttaatcaaacagaaattagaatatgtgcaacactttgggaacagaaataaattctacctctaaccgaggtctacctatggtcttgaattttcctaaccctaggtggcaaattacagtaaatacaagtacaatttgggtctgtaaatttctatgcaatatggagaaactgatattcataagacctgaaaaaaatagtaagtctttttacgtgaaggtatctcaggataaccaaatagttactaggggggaagtgcttttgcaaataaatatgtcaataaatacagaaagaatgatgtaaattgtatataaccattatgcaatctctaataaaataaaagatctggaaaataatcatcaattattgataaagcctaattgaaaggctgatgggcaactttatgccagtggatccatgtgataccatctgagcccactgagcaatatcactgtcaaaaaaatatgatcatgctaatcaattcatgtgtgtgggtgaacacacacatatctcataactaacattgttatagcttaagtgttttctactattgatattctttattgtcattaaattaaaactgagtttaccattttttcaaactcaaaattgtgagcaaaaacatgcatagataaggtttcctttttgttaattttttgtttccttttcattttttaatgcaaaatggttaggacatctcttggcacatagcaagcattccaaacaaataaagctatttataatattgtaaagtgaggtaagtgaataacaatgagagtagacgtaaagcttacaatacaacaaaacagaaagtatgcagtcactgaagaccaacttttaaatatatatataaatatacatatttgaaccttttcatactttatatatatttgaatcttatcacactttgagatttaactaaaagtttacaggaaacatacagtagagaaaaacatgcttaaaaaaacacaaggattcaatcagcaaaattcaaaaatctgggaaattcttcaggacacagactccagtttcttcaacaaataaatgaaaagacataaattaagagacctgaactgaatccagctgagctttttggatcctgatttaaataaaccaactctgaaaaagcatttgagtctgtcagaaatattgtaatagtgactgtatatttggcaatttaatgtcatttgtcttgttttgttctagtgcagtaatggtattgtgattatgctttttaaaaaataattcttattttttaataacatacactgaagcatgaaattatgtgtctggcatctgctttattaatacaaaaacagtggggatgcagttgaggtagtagaatgggtagaaataaaattgactataggttgatccttgtttaagtttggtgatatgagtttatcattaactcttcccctatgtatgattgaaaatttccataacaaaatgttttgaaacagaagcagaggataggactatgctgacttgactgctaatcaattcatgtgtgtgggtaaacacacatatctcatcactaactgttacagcttaagtgtttcccacattcatattcttgatagtcatgtgctcgcttcggcagcacagatacatattcttgatagtaattaaattaaaacgaaggtgaccctttttaagctcaaaattgtaagcaaaaacatgcatatataaggtttcctttttcttaatcttttgtttttaatttttaatgcaaaatgcttaggacatctcttggcatatagcaagaattccaaacaaataaagctgtttataatactgtaaagtgatgtaggtgtataataacatgagacatcatttccatcaggagagtggtaggccaaaaaaaagaaattaaggaactcaaaggagtcttcaattttattttaattgcttgaaatctgaggcccaccttaactgatctggtttatgtttgaaaaattgtaaattggtcatcatcagacactttccctttaattcaatcctccttctgtcatctatgttttggtagcctatattctgcggaagcatcaatcataagcaaacggctactattttgtttaagtacgttccttggaattagtgaatttcttattcatggtcagaaaaacagcctcacatacatggcgataaggctgagaaaggcccagccaaagccccttctttactccacctcgtgcttcaaatgccagtgttgtagtttaaatagttaattgtaactaaaatacaactacaccagcctgacaggtccctaagctgttaatcacccaattacctacttactatggatgtgttttatatttttaactgggagaaagctttaagcagggggaataaaaaagaaaaaaaaaggaaagaatatgaaaaagcacaagagcttttgagaaagaggacacccagagagaacatcacataatttacaattggcctcagaccaatccagggtgcaaggaagccattcttctgtatcctcggcaaccaatctgaaaatttccccataaaccggcttcctgcccatgtgtaattcgtgcttatcaattaaaatcccattaccttatgcaacatgtgtatgtcatgtcctctggcagctggatgtgctgaatgtaaagccaggcctgacctaaataacctgaaactctttgcaaacacatttttatgtggattagaaaaatacttcagaagatttataggtcactgatagaaatatgtttttatggaggctcccactttaatctaggcctggtttagacacatgtttcttctgaaaaatttaatttgcacatccctgtctactggaatgtcacaacacagctttcccatgcatcagcataaacagagaaatgatagcaaagcaatccacatctagatttgtacatgacagctgcaaaaaaaaaaaaaaaaaaaaaaaaagtactttggcacgaagtccactaaaaattcacattcaacattacagaactaagggaacatgaagtttaccaagtaaatttgacttactttctcttttttggttttgcattctctaaattagaaactccctgtaaaataaaataaaatgaataaaataaaataaataacataaaataagacaaaactatatcaagagatctgaaagagaattcattcattttctagtataatccaaacgtagttccttttgtcttttccctagtgaaaaagactgatatgtcccctgttgtattttagtaatgtgtcacagaagtttggctcacattttaacttttttttcccttttgtctttgtaactttgagaaaggtaggatatttcctttattaacgagggcttatatcttattttaagcccttgccagtttaaaaaaaaacaacaggtcttttaaattaaaacatccaattaaatcctcattatctaaacctctgtccctccatcaatccaccaaaaccaaggagagagacacatacctgggtgtgttagttgtatcatagagtgccttcatttgagaaaaatggaaagtagcctatcacaataccctcagggtgttgaaatacatctgtgattcatctgacatttttcttcagatcaagtgaccattgtgtaaaatcccttacacttttggggaaagaatttgtcacatttttcaccatccttgaaacagcttaaactgccctagacacctttaaaagctcttcagattctgtctttattattcacctactcctccatttaaaaaacatttactgaatatctacatgaaaggcaaccgattgtgttctggagaggttcatttgtttggcatggtaggaatttacatactaaagaaaattgcaacgaatattccacttttgagggggaaaaacacaaatgctaaggctaaaaggaaaggtgaatggaaaccagaaaaaggaagtttgattctattattcaggtcgttaatagtaacagcctgggcacagtgaaatccaggataacctttccccaagatagtgatcgaaggggccatttatctaatctttattttgtttgtatcaagatttttaactgcagaggacaatttgaattttttattttcctagtggttgagcagaacgttgctaaaaccccacacactgaaacagtcagtccctgaactcgaggagcacatattaccaagtttgaaatacttgtgcatgacccataggacattgcttgtagggaagaggtggtggatgggggttgtaagtaaggatgtgggaagcatgaattaagccctaatgtgagtgaggatatcagcaggcctttgaggagttagtggtcagatggaccactccttccattctctatgctttgtcatcctgtgccctaaaagtatgcaatctctattcaaggtctttttctgaaattgtttaggtcttgggccagatctttccaaacctcagattagaagctaattgtgttccttgccccacaatcagtagccactcacatttaacaagctttgtgacaatcatgaggaaagaggatggccatccatctttatagtagtgtttttctgttatgtgtatttggaactcactaggaaagaacaagcaagctccatgttccacagtctatgcaatcgggaccaaatatgtctcaatagtcaaaatccatcatcctgagtctcattagtttgtcgtatgggtttaggtaaatctcttgggattatgaatgttgccgtcttcaaaatagtctaccttttgtgaaaatagacaagatttgcaataaggaatatgggaaacattcgataccttttaatttttaattattcaagtcacagtattttggaaccaacttcttatatcaggattcctctgcctttgctatcaaagagattaattccagatggctcacaaaatttatatgcaatcgagcaagagagtttgaatttggaaagaagatgtattacgcaaacatagtctcctgtatcacctgggtgaagcttttgttaatacaattaggtatgggacccacacaaagcttaaacacttgtaacagctgattgtggtgaaaggaacataattagcttccggtttgaagtttggagacatctggactgagattaaagtaatttcctaagaccacaaatagagattggttacttttactatgtatgttgtcacaatattctctagggactatccactttgttctggttttactggaattggggtcatccaatttttcctcatgatgaatcagtttaggtttgggaaattttgttaaaagactttcttgtaatgaatattttgggcaaaaaattgagctgaaacttctttttaatctctattaagatgaaagagttaatgtatttctccttaggcaacctgcttcctacaagggtagggagagtcaggcacattaaatgtgggtctggagtgtgattatatgaggaagagggattacttaaacaggccaacatctacttaattagaataataggtctattccctcggtgttgcctagttgtagattactactgaactggttaagcaatttttagtactgcttataccagactcaaagcagctgtggaaaatgtaaatgactttcaattctgactgctgcttacataagcagactgtcacgtatattggagttcacaccctgggtactttattcctagaggggcaagtcaaagaaagactacatacacttttatttttagaaccacagctgtgtatgtgtgtgtgtgtgtgtgtgtgtgtgtgtgtgtgtgcgcgcgcgcgcacgcgcgtgtgtgtgtgtgtgtgttctactctgaattccaaaagaaagataccactttggagagttatttcagtgaaaaaatgtctagtcctttaatttgacatttgccatgaatgctgggtaaaacttactcctgttagccttcacttcagtatcccctaagttaggcagtaataattcttcttacctttcattcactagggaatgtgtggcttaattttatttttctccctagcaattgttagaaaataaaaaatgaaatgtagaaaaattattacaaatgaaccaacagaaactaagaaacatttccaagctatgttatttttaaggtaaatgagggtagactctaacagcaaagcacttccgtatataaaattaggtcaaagttttaaaaaatagaaagagaagatgtaccttaaaagaacagataaattgtagatatcaaatatatttctattctcatgcagaggttacagatgactatcctttgggattcagactaatatgtgcctgtttcttgctttattgctttgtaaacctcactttcaaattacaaagtcaaaaggaaaaatgtaaatatgtcaggagttgttgttgcctagctaatggaaatgggaaagatgattctgtaccagagaaaactgattggcagcaattgatgatgtaaatcccatggtgaatttttaggactgtagagctgatgcaaactttgacttgaaaatgaaaaaattgaggctcaaaatgataaatggactcatttacgatcaagcatatagtgctttaccttaactaaatactggtggatttaaaacatttctaatgtattttttttggaattgcacaagtcattcatttctacattcacattttattcaacaaacacttattgaacatctactatgtaccagacactgttgtaggggagaaaagatttatttcctcacctatcacaaagttcatggctgatattcctataacaaaagagagattagcaagataaaataatacacacttatttattaaaagttttatgtggcataaaccttcagaaatgaagtccctaaaactcagagaaaagtgtattttttttaattgccgtgtagaaatatgattggaagacaaaaggtatgatctgatggtaataaactggagggaatttagaaaggcctgtttgttcagcttcctcttggcgtctctgtgtgacatcccttttctctgagtatagagcagaatacctgtcatttgagagccttcagaggaggagaaggggagagtaattcagagagtgatcttcttagattttatggcctgcttcagggtagaaggagagagggggaattataattctatggcctgtttcaggggagaaaggggcaatggaaatttcggtttctatggtccactttaggagagaaggggcaagagaaagtcagagatatcttcctgcttctgctgttttcttaatttccttcacttcaagatagtcaatgatatggttaggctttgtgtccccacccaaatctcatcttgaattgtaatccctaggtgttgagggaggaacttggagggaattgggtcatgggggtggttttccctatgctgttctcgtgatactgagtgagttcttacgagatgtgatggtttcataagtggttaacagttcctcctactctctcctgccaccatgtgaagaaggtacattctgcctacttccccttctgtcatgactgtaagtttcctgaggcctccctcacagtggtttgactatgagtccattaaacctctttcctttatagattgcccagttctggatatttctttatagcagtgtgaacatgatctaatacattcagtatgccaatgtgtgatattttaaggtagcatttcatgtacccctcattgttttagatgcaaaaaagaattgcaagtagtctttctttcaattatctatcaccagtgactgttgatctcagaatcctattgaattccatttttttagctttaaagattaaatgagttaacctatataaaatccttacatgatgtcaaacacactggagatacatatagatgacatttcttattagatacattgtttattaatagttagatagaattctgattttgaagtgaattgaacatgggtacaaacacatatgtaaatatgtataacacacatataaattcctattaaaataagctaattcaatttctattttgtttaattcattctcttgcaaaaatgaagattgttcacttgcataactaaaatggttatattaatattaaaatacagtgattccaaaaatgccacacgcaaactgaataagtatgtttctggatatttcttggcttcctatgtttcaacaaatttcctacagattttcaaagaagacatgacagtttatttttaaaattccagtagacatgtagcaaagaggatgattatgaaacttcaaaggtaatagacagggtggttccaagatggccgaataggaacagctccagtctacagctcccagcatgagtgacacagaagacgggtgatttctgcatttccatctgaggtactgggttcatctcacaggggcttgtcagacagtgggtgcagcccactgagtgtgagccgaagcaggacaaggcatcgcctcacctgggaagcacaagggaccagggaatcctctttcctagccaagggaagctgcgacagatggcacctggaaaatcgggtcactcccaccctaatactgcacttttccaacagtcttagcaaacggcactccaggagattatatcccacacctggctcagaggatcccatgcccatggagcctcactcattgctagcacagcagtctgagatcgaactgcaaggtcacagagaggctgggggaggcttgagtagataaacaaagtggctgggaagctccaactgggtggagcccaccgcagctcaaggaggcctgcctgcctctgtagactccacctctggcagcagggcatagccaaacaaaaggcagcagaaacctctgcagacttaaatgtccctgtctgacagctttgaagagagtagtggttctctcagcatggagttagagatctgagaatggacagactgccccctcaagggggtccctgaccctcgagtagcctaactaggaggcacaccccagtacgggcagactgacaccccacatggctgggtacccctctgagatgaagcttccagaggaaagatcaggcagcaacatttgctgttcagcaatgttctctgttctgcagcctctgctgctaatacccaggcaaacagggtctggagtggacctccagcaaacaccaacatacctgcagctgagggtcctgactgctagaaggaaaactaacaaacagaaaggacatccacaccaaaaccccatctgtacatcaccatcatcaaagaccaaaggtagataaaaccacaaagatggggtaaaaacagcagaaaagctgaaaattctaaaaaccagagtgcctctcctcctccaaaggaatgcagctcctcgccagcaatggaacaaagctggatggacaatgactttgacaagttgagagaagaaggcttcagatgatcaaacttctccgagctaaaggaagaagtttgaacccaccgcaaagaagctaaaaagcttgggaaaagattagacgaatggctaactagaataaccagtgtagagaagtccttaaatgacctgatggagctgaaaaccatggtacaagaactacgtgacgaatccacaagtttcagtagccaattcaatcaacaggaagaaaggatatcagtgattgaagatcaaatgaatgaaatgaaatgagaagagaagtttagacaaaaaagagtaaaaagaaatgaacagcctctaagaattatgggactatgtgaaaagaccaaatctacatctgattggtgtacctgaaagtgacggggagaatggaaccaagttggaaaacactctgcaggatattatcaaggagaacttccccaacctagcaaggcaggccaacattcaaattcaggaaatacagagaatgccacaaagatactccttgagaagagcaactccaagacacataattgtcagattcaccaaagttgaaatgaaggaaaaaatgttaagggcagccagagagaaaagtcaggttacccacaaagggaagcccatctgactaacagcggacctctcagcagaaactccacaagccagaagagagtgggggccaatattcaacattcttaaagaaaagaattttcaacccagaatttcatatccagtcaaaccaagctttataagtgaaggagaaataaaatcctttacagacaagcaaatgctgagagaatttgtcaccaccaggcctgccctacaagagctcctaaggaagcactaaacatggaaaggaacaaccagtaccagccactgcaaaaacatgacaaattgtaaagaccatcaatgctaggaagaaactgcatcaactaacgagaaaaataaacagctaacatcataatggcaggatcaaattcacacataacaatattaaccttaaatgtaaatgggttaaatgctccaattaaaagacacagactggcaaattggataaagagtcaagacccatcagcgtcagtgtgctgtattcaggagacccatctcacgtgcagagacacacataggctcaaaataaagggatggaagaagatctaccaagaaaatggaaaacaaaaaaaggcaggggttgcaatcctagtctctgataaaacagactttaagccaacaaagatcgaaagagacaaagaagaccattacataatagtaaagggatcaattcaacaagaagaactaactatcctaaatatatatggacccaaaacagaagcacccagattcataaagcaagtccttagagacctacaaggagacttagactcccacacaataataatgggagactttaacacctcactgtcaacattagacagatcaacaagatggaaagttcacaaggatatccaggaattgaactcagctctgcaccaagcgggcctaatagacatctacagaactctccaccccaattcaacagaatatacattcttttcagcaccacaccacacctattccaaaactgaccacatagttagaagtaaagcactcctcagcaaatgtaaaagaaaagaaattataacaaactgtctctcagaccacagagcaatcaaactagaactcaggattaagaaactcactcaaaactgctcaactacatggaaactgaacaacctgctcttgaatgactactgggtacacaacgaaatgaaggcaaaaagaaagatgttctttgaaaccaatgagaacaaagacacaacataccagaatctctgggacacatttaaagaaatgtatagagggaaatttatagcactaaatgcccacaagagaaagcagggaagatctaaaatcaacaccctaacaccacaattaaaagaactagagaatcaagagcaaacacattcaaaagctagcagaaggcaagaaataactaagatcagagcagaactgaaggagatagagacacaaaaaacccttcaaaaaatcaatgaatgcaggagctgtttttttgaaaagatcaacaaaattgatagactggtagcaagactaataaagaagaaaagagagaagaataaaatagacacaataagaaatgataaaggggatatcatcaccaatcccacagtaatacaaactaccatcagagaatactataaacacctctacgcaaataaactacaaaatctagaagaaatggataaattcctggacacatacaccctcccaagactaaaccaggaagaatgtgaatccctgaatagaccaatcacaggctctgaaattgaggccataattaatagcctaccaaccaaaaaaagtccaggaccagatggattcacagccaaatactaacagaggtaaaaggaggagctggtaccattccttctgaaactattccaatcaacagaaaaagagggaatcctccctaactcattttatgaggccagcatcatcctgataccaaagccgggaagagacacaaccaaaaaagagaattttagaccaatatccttgatgaacatcgatgtaaaaatcctcaataaaatagtggcaaaccgaatccagtagcccatcaaaaagcttatccaccatgatcaagtgggctttgtccctgggatgcaaggctggttcaacatacatgagtcaataaacataatccagcatataaacagaaccaacgacaaaaaccacatgattacctcaatagatgcagaaaaggcctttgacaagattcaactgcccttcatgctaaaaactctcaataaattaggtattgatgggatgtatctcaaaataataagagctatctatgacaaacccacagccaatatcatactgaatgggcaaaaactggacgcattccctttgaaaactggcacaagacagggatgccctctttcaccactcctattcaacatagcgttggaagttctggccagggcaatcaagcaggagaaagaaatacagggtattcaattaggaaaagaggaagtcaaattgtccctgtttgcagatgacatgattgtatatttagaaagccccatagtctcagccctaaatctccttaagctgataagcaacttcagccaagtctcaggatacaaaatcaatgtacaaaaatcacaagcattcttatacactaataacagacaaacagagagccaaatcatgagtgaactcccattcacaattgcttcaaagagaacaaaatacctaggaatccaacttaccagggatgtgaaagacctcttcaaggagaactgcaaaccactgctcaatgagataaaagaggacataaacaagtggaagataattccatgctcatggataggaagaatcagtattgtgaaaatggccacactgcccaaagtaatttacagattcaatgccatccccatcaagctaccaatgactttcttcacagaattggaaaaaactactttaaagttcatatggaaccaaacaagagcctgcattgccaggacaatcctaagccaaaagaacaaagctggaggcatcacgctacctgacttcaaactatactacaaggctacagtaaccaaaacagcatggtactggtactaaaacagagatatagaccaatggaacagaactgagacctctgaaataataacacacatctacaatcaactgatctttgacaaacctgacaaaaacaagcaatggggagaggattccctatttaataaatggtgctgggaatactggctagtcatatgtagaaagttgaaactggatcccttctttacaccttatacaaaaattacttcaagatggattaaagacttacatgtcagacctaaaaccataaaaaccctagaagaaaacctaggcattaccattcaggacataggcatgggcaaggacttcatgtctaaaataccaaaagcaatggcaacaaaagccaaaattgacaactgggatctaattaaactaaagagcttttgcacagcaaaagaaactaccatcagagtgaacaggcaacctatagagtgggagaaaatttttgcaatctactcatctgacaaagggctaatatccagaatctacaaagaactcaaacaaacttacaagaaagaaacaaacaaccccatcaaaaagtgaacaaaggatatgaacagacacttctcaaaagaagacatttatgcagccaaaagacacatgaaaaaatgctcatcactggccatcagagaaatgcaaatcaaaaccacaatgagataccatctcacaccagttagaatggtgatcattaaaaagtcaggaaacaacaggggctgtagaggatgtggagaaataggaacacttttacactgttggtgggactgtaaactagttcaaccattgtggaagacagtgtggcgattcctcagggatctagaactagaaattccatttgagccagccatcccattactgggtatatacccaaaggattataaatcatgctgctataaagacacatgcacacgtatgtttattgtggcactattcacaatagcaaagacttggaaccaacccaaatgtccatcaatgatagactggattaagaaaatatggcacatatacaccatggaatactatgcagccataaaaaatgatgagttcatgtcctttgtagggacatgaatgaagctggaaaccatcattctcagctaactatcacaaagagaaaaaaccaaacactgcatgttctcactcataggtgggaattgaacaatgagaacacatggacacagggtgaggaacatcacacactggggcctgtcatggggtgggggtagggggaagggatagcattaggagatatacctaatgtaaatgatgagttaatgggtgcagcacaccaatatggcacatgtatacatatgtaacaaacctgcacgttgtgcacatgtaccctagaacttaaagtataatgaaaaaaaaagcaatataaacaccaggagagcttgataagacttggagctaatgttaggtgcataaatgcatataccccaataaaagtcatataaacatttagtcttccaaaatttttcaccaaattttacttcctcatagactcctggaaaacaaaaggactctcttgttctctgaatactctccatccttgcctcaatttagatatgctcaagatggaagcactcagagtgtgacttgatctgactccaaactgatctagaattgaaggctgttaggaagactattctcacacatacttgtactttgaaaggtggttctacaaattgtctggaggcccatggccaatatcaacagggttttgtgaggaaagagatccccctagtagcagtgagcattgtcatgcacagcatgaatgctcaataaatgtactaaattgaactaaaatttttaacaaatatgaggatacactaacatcaaatcaaaaacaaaaaaaagtaaaatgatgctgcgagcttctcagggcataattaatagaaagctatttcatattatcttcttaaggctaaaggaagcattttgggagttaactacgaggataagtgattctaggaaatgtgatacagaaaaggggtttgtgttcctgagacttctcccttgtctggggagcaccatttctccttccatgttgaatatcctcacccaaaaagtgagacaaagtttgctctagtccagcaatagacaggatggtaccaggagctgaaattatttttatagtaatagaaagaaatttctgcaataagacttaaaaatatcaattaaaacaaagacaaatatacacgatgaaacacaacagcatccaatcaatgggataggagattaaaatcatttcattaaaggttacaaattatgctggatagaaagaataacttctagtgttccatagaactataggatgattaacaataatatattatagtttcaaatagctaaaataaggatgttgagtgttaccaacccaaagaaatgatatttgagatgatggacgtgctacttactctgatctgatcactatacatgatatatattgaaataccactgtatactccccaaatatgtacaattattgtgtcaactaaaatatgaaataataaaataaaacaattttaaaattaaaaaaagaaaaagttcatagactaatttttcagtgtatctaaggcaatcagagagatgaaaaaatatatattgagctaccaactgtattttcaaaacgagaagatttatgtgactggtaacaagtcatcacaaatgtgaaaaagtcctactgccttcctccatacctgattgcaaatgaatggaaaaattccagtgacagaaaagtctcccaagttatgaatgagatcactttggcaaaggggaatgttggtaaatgtcagagcccagtcagttaaaaagcaagttactaagaatgacaaggataaaatcctatcctttttgtgatttcttgattttacacatttgcagaataataacggtggaatacatacagtatcaagcatagttctaaatgctttttgtgtagtaattaatttaatcctcacaacaatctgtagggttgatactattacaattaacctcaatttataggtaaatttatagatgggtaaacagaggcacagagcagtcaacattcttgcctaagctcacacaactagtaagtgataaaactagggttttgtgcgtggtgtcttcactactacctgatactacttctatgcttgacggcatagatccaaaatctactgatcatctaggtcagaaatttcacaaagaagcactattagccagaagggagattagctacaaaaatgcagagaaatgtaataccacatgtcactactaaataactcagaaagaacacccttcttcaagccctaatactaataatttagtactatttgaagacaagtgtgtaaacagcacactgatgtgttttaaaggtattaattattttgtagctgccatcatcatcatcaaagaatgcccagcaatttatgacagcacagttaattaaaagcggacacttcaggaaccaatgaatttagatgacagtctgtgcattagagagccccctcagcatattactgtaataatgttatggttctcagggaaaacagattttatcctcctgtgagaataaaatgaagaaggaaaagctacaatcagctctttctgatgggaaaagtaaggcttgcttgccagcctgtccagctcctgtcttcaagaaacaaccccatacagctagtgaattctgctttctctaagagggtggtgtacagcatccacacacagcctctcatcgcagggcaggtcctgtagcttatagcgcctggagaatgcacggggccataatccatcaggaagagggctggtaaattgcacgaactttgccatttgtctactagtgtgcgaagagagctttatatcaatcctaaagcaacaaactcttctcagagcactataaatatccaggatggcaaaacaggttacctaggggatggttatttgcattataaaagattcctcctttgcaaaaagattcccttccagatgtcttaaaacagaggtctcttaagtgtccttaaatgtgatttataaaattatatttacacaaggttttagaaagggaaagaacaactaatgtttattaagtgccatgtttcctgccacttattatcttctttaatcttcatagccacaaatgaaacaagagcaagccaagcaaacttgcaaaaaaatgtgataggaaatccgatgggtaaaaatgtcaaattccatctttgcaatggaaaagcactgaactggtaccccagaacctggcttgctctcccagggctgctactaaactggacaagacccaggaacccacccacagctcaatcaggtgtccatgtataaaacgaaggctgatgaacaggaactttaaaatccctttctgtagaaacaatccatgcttcctgatctatagtagttcggtccaatgtcagtagtgatgacaaatgcttttaagagaaaattaaagtaggaatgggcttttttgctttacagctttttttttttttagagatgattaaagagataaccatggctttcatcagattcaattagtagttctcctgtaagcctaggaaataaaaaaaagaacagagcacaattaaccttcatctattgatttcattttattttaacataagtctctatttacgggacgaaaccaattaaaactaccaaaaggtgttcatatgtgaattggtggcagaagaacagctgtatgtaatcatagatataacaggaaacaataaaaatgaaagaaaagtgcagtctttttagtcaacgtaatctgtgttttacatattggcttgttatgagtcattacacaatctcaaagtcaaggaaaagattacgtgcactgttttgacattgactcctcttgtccatagtttgatgaagacctagctgatggatgccattgttaatctcattttcttcctttagtgtctatgttattaatagctatgtcaatgttgatgataatataagacagaacaaaaaactctcaattttaatagtttaagccaagtaagaaatgcagttaagtggttagaataccaacttgggagtcacctactttgacttctccattactcacctattctaagatgacatgtcacctttcaatgtgtccatttacccatttataagacactagactctaagtggttttttaagaccttttgtgaaaggttctgggacactgtgcagtgacaacatcttaaacacctctctttcatcatttttaactctatttcttcctttttaagctaagcttaaatctcatgttctccatgggacttgtaccattaaactacgaaccacagttatgtacttagagttaacacctgctattgatcatttaccttgtcccagacttcctgctaatagtataaaatacattgtcactttttattctcacctgataattaagaggtaacaaatagttttctcattttataggagaagaaacaagggcttaaagagtttaaagaacttgtccaaggtgggatttgtttgtttgtttgtttttttctttgaaacagagtcttgctccatcacccaggctttctgggttcaagcgattctcctgcctcagccttccgagtagctgggattacaggtgcccaccaccacacccggcaattttttgtatttttaatagagacagggttcaccatattggccagactggtctcaaactcctgacttcgtgatctgcccacctccacctcccaaagtgctgggattacaggcgtaagccaccatgccccacccaagatgggatttttataatgtttgtttgacttcctccccccaattttgtgcttctaattactgtattgcattatttttaggaattcctcctggggattcttacagatgttaggcttgatacttataaatcagaatttaatcaccattacttatgttactctctagatattttgaatatatattttcttgctgaagtggacatctgtctttcattgatctgaaaatcaatgtgtagaagaaggaataagaagaggaagagaagaaaaaagagaagtaggaagaaggaaggaaggaaggaaggaagggaaggaaaaaaactcatctaacttctcttgctactagaataagatatgctgtttaggtcacatctatcacagatgctaacttaagacactgatacaaaacctgactaacacagggaaacagcaaggtgtgtgcatctatttttaatgtcacaaacttcagtggagagagtggttctggatccagccattgtggtagtagctgcttgatttggccacttcctaactgtgatagaagcagcagcaatctttggtggctggtttatactgtgccttctcggtgtaatccctgcaaacttagagtatgtgttttgagttcccaataattctgggctctctataacctgtagtatattcctttctgcttaaattgactagcattcatttgtatatctgcaaataaccctgatcagtatcttgtcacattaattttagttcccgtattagttatgtattgtgcaacaataaattgtgcacaaatttatacaaataattgtgtattatttgtataattgtaatacaaataattgcatttgcataattgtatttgtataattatttgtataattgtaatacaaataatattgtaatacaaataattgtgtattatttattgtgcaacagtaaattgtgcaacaaattactcccaaatttaatggcttaaaaaatacatgtttattatctcagagtttctgtgggttaagaatatgggcctgacttagatgggttctctgttccatggtcactcacaggattgtaatcaactgtgggcccaaaggtttaaggtttcatctgaaggttcagctagggaaaggattctcctttaattttactcagtgattgttggcagcattcaatttcctgaaggctgttgggctggaggccttactttattgttggctatagactgaatgcctttcctagttccttatcatgcaggtctcttccacatggaatctggcttcattatagtgtgcaaaacaagaaggcaacagaggcagtctgctagcccgtcttttgtaccctaatcacaaaagtgacttcctgtcacctttgccctactctattggaatcaagtaacatgcaaggatgaagattacacaaggacataaataccaaaagtcagatgttatggttaatttattttatgtgtcaacatggctaggccacagtacccagatatttagtgaaacaccagtctagatgttgctctctctctctctctctctacacacacacacatacacacacacagacaccatgcacaccctattacttctgtttctctagagaaccctgattaatacagtggtgttcactgaggtccttttaaaattttgccttctgcactaccaaaaggaaagtaatagagtttaatgttggacaacgctccactccagaaaaatcttaaatgtatttatggagccattttagtgcagcatggggccttaaaaaacatctggtctaactctgttagtttatagaggtaaaaactgggttctggattgggtaatgacttaatcaagttctatttaggaaccaagccagaaggagaactcagttttccattttaatgctcttactattgtctgataagttatcccaagttgaaagtggagaattatgcctggtggcctaatatgattatagtagaggaaaatcttcatggacaaatggagcagggtagttctacccttcagttgttcttcccataatgggcaatggttttgtgctggtgccctctatccttcagccgagactccctaatggtcaatagcgtgcatatccaagtcagctatctgaggtcatggatgctgcctttggctatgaaatagaacaaaactaactagccatgaggggattaactcctgaccttggcctcattagtgctgagctctaaccaactgttggacacatatcatattgtttgtctttaaaactatgcttgaatctgctatattactttctcattaatatctagtagctgggaataatttaatggatttttccagtgctttttatcagtacaaaatgctgatgagtaagtgtataaaaaattaaacttgatttttaaaatatttaattttattattatcattatccctattttacaaacggtgctgggaaaactggctagccatatgcagaaaactgaaactggaccccttccttataccttatacaaaaattaactcaagatggattaaagacttaaatttaaaacccaaaactataaaaaaaaccctagaagaaaacgtaggcaataccattcaggacgtaggtacaggaaaagattttacgatgaaatcaccaaaagcaattgcaacaaaagctaaaattgacaaatgggatctaattaaactaaagagcttctgcacagaaaaagaaactatcatcagaatgaacaggcaatctacagaatgggagaaaatttttgcaatctaccatgtgacaaaggtctagtatccagaatttacaaggaacttaaacaaatttccaagaaaaaaaaataaacagccccatcaaaaagtaggcaaaggagatgaacagatacttctcaaaagaagacatttatgcagccaacaaacatgaagaaaggctcaacatcactgatcattagagaaatgcaaatcaaaaccacaatgagataccatctcacaccagtcagatggtgattattaaaaagtcaagaaaaaacagatgctggcgaggatgtggagaaatagaaaggtttttacactgttagtgggaatgtgaatcagttcatccactgtggaagacagtgtggtgatacctcaaggatctggaaccagaaataccatttgacccggaaatacaatttgacccatatatcccgttactgggtatatacccaaaggaatataaatcattctgttataaagatacatggacacttacgtttattacagcactattcacaatagcaaagacatggaaccaacctaaatgtccatcaatgatagactggaaaagaaaatgtggtacatatacaccatgaaatactatgtggccataaagaggaatgagatcatgtcctttgcagggacatgggtgaagctggaagccattatcctcagcaaactaacacaggaacagaagaccaaacatcacatgttctcactcataagtgggagttgaacaatgagaacacatggacacagggaggggaacaacacacaccagggactgttagggggcaatgacgaggggagggatagcattaggacaaacacctaatgtatgcggggcttaaaacttagatgatgggttgataggtgctgcaaaacaccatgacacgcatatacctatgtaacaaccctgcatgtcctgcacatgtatcccagaacttaaagtgaaaaaaatttaaaaggaaaagaaaaccctgaaatatgaattagtaggtgaaaaaataccactataatagatgttcttgtttacagctgtctacatttggtgggaaatctaaggctgagttgtcaaacactccactatacctaggtgtctgaggcaatttgtggagattaaaatcttgggttttctaatgcgcatcaacagtaaatcctgttgcttcttcttgtccagtaaaaatcaatacttttagataagaagcattgattgcaaattattttaagcagttattttaaaataacatccaagattaagtgagagtttgacttaaagtcatttaatcaaggatactaaattaaaagattactctgcccgggtgtggtggtttgcagaaggaaaggcaatgatcattaacatgcaccatgccaggtgcttaaagagggttacaacaacatttgatgctcgctgcaaaccaagagacagaatttattattattattattattatacttcaagttctagggtacatgtgcacaacgttgtatacatgtgccatgttggtttgctgcacccatcagctcatcatttacatttggtatttctcctaatgctatccctcccccagtcccccaccccacaacaggccctggtgtgtgatgttccctgccctgtgtccaagtgttctcattgtttaattcccacctatgagtgagaacatgcagtgttttggatttctgcaagagacataaatttttattcatattctattgctcagaaaacttagggtcagagaaattcaatcacattcccaaagacaccgttcccagtctgagagcagaaataaaatgtaagtctattcacccatctcaagttcttttcactgtgttctctagatatcagaacatatttagcacatgtattataaggttgggttatttttcctaccatcgttccctcttcctcacttctcatctcccaaaaagacactcttctaatcaacccctcttaatctctctcactcttgtgtacacgtgcatgcacataactcctcaccccactgccaccgcacacacttgtggcagagagaccaaaaaacaggactactacttgggatccagaactccagcctagactccatctgtcactgcagtcaagtcactaatctcatcttcctcattggtaaatggatgtgtttcctataattttatctctaaggatataactggccaggcatggtggctcaagcttgtaataccagcactttaggaggtcgaggcaggcggatcacgaggtaacaagatcaggagattgagaccatcctggccaacatggtgaaaccctgtctctattaaaatacaaaaaattagctgggcatggtggcacgcacctgtagtcccagctactcgggaggctgaggcggtggcggggttgggggtggaattgcttgaaccctgggggtggagcttgcagtgagccaagatcctgccactgcactccagcctgggcgacagagcgagattccgtctcaaaaaaacaaacaaaaaaaagtgtataactgtttattatcaagtattgttatactttaacatctgtgctctttcaaaaagtttataactaattgcctatcatcaaacatttttatactttaacatctatacttccctaagtgaagaggagaattgatattatctggttacttttatgcctctgcgccatcagcaatttcaagccttcaatcctaccttgtccaatatggcagccatccatagtctcaagtggctattgagtgcttaatatgtggctgatacaacttaggaagtgaattttaatttaatttaattttaattttaatttaaaaccaaaggtgagatttttttcgctgggactgattgcacttaaaccattgaagtttcagcatcgaactgaaatgtgctcttaactataaaatacacatcagatttcaaagtgttagtttagaaacaagcatacaaaaatctcattaattttatactgattacatgttgaaatgataatactttagctatattggcttaattcaatatgttattaaaattaatttaacctgtctctctttttaaaacagtttattttgacaactagaataactaaaatgtgtgagtcacgttatatttctaatggacaggactgctgtaattgtcttttagcaatgtaataggtccaagatggggtttgggtatctgtttgtcttcaggtaatccttcaattcagctgctattgagaatgactgccagaagttgcagcaaagattttgtgtatcaactcccttgtgatttattctctaaaataatgtgattgaataatcttgcttgttttggtcatcagtctgtatcttaactgaaaaaaaaaaggtcttaatctattaacagtttacaggacccaagtattgcagaggggttgttatatccaactcattttaaatgttaccataaagctgtgcctggggccggcttaacacaaattatattctctagagacaaaagatagccaccttctgaaagccagccatccttcacgtacactgcaaaggagttccagtggtgagatggcactgtttgtgtgtgtgtgtgttttggtttgagtgtagtgacaccaattatgataaggattaaagatcctgggaggggagagtggtggacatagtagacttccccttaacattcccccacctaccttctggtgtgtctttctctttgcaaaaaccagaagactaaaaaccacattatatacattcccgcaaagcttggatagcagatatgatttagacttggcagattatacgaatccttgtgaaatttggaaagtgggatgtgaaagtggaggccacatccggtagccatgttaaaggaaatgagcaaaatttcctttttacctaaaatatatcaaatattatcacttcatcaaatcatcattacaaaattattaataacctatgttttactcattttttatatgaagtctgtaaaacatattatatattttacacttattgtccatctgcatttggactagtcacttttcaagtactcaattgccacctgtggttgtacagtgtagctctagggcaggggttagcaaactttttctgtgaaaatcagatagaaatattttaggtttgtgagacacagtttctattgcattctactgtctcctttatttttgtttctgtttttaaatatacttttaaaaatataaaagctatttttagctcgtgcatgatacaattacgggctgcctaaggctatgattttcagtccctactgtagagtgaaaatcagcccttctgagcgttctctaacttctatgctaaatcctgcctgcttctagtagcaagagtagattctgttttccacagttgaatttggcaaatttatacggaacattattcaccttgttctacagtgtaaggaaatagagactgcaagacttgaagcaactttccaaggtcatatagcttctaagtgacagagctagaaagagaatccacaactgctcaaatccaaagctgacaattttatccgctgcatcattggctctccattattattaagactttctttagcttgagtaatgaaccttcactgatccatttatttagctgacaaatatttattgaatgaccactatgcagaagatatgaataataggaacaatgcctttgacccacatttaagcacattttttaaaaggctcaagttttctattaatttatgagatacaaaatgaagtggaaaattgacaattatttgcttacttcagtcaatatagacagcaagtcagataattcaggcttgatccagttagccccaaattggcagagatacaaacattttatgttctctgtcttaatctgttttgtgttgctgtaacagaatacctgagactgggtaatttatagcaaacaggaatttactggctcacagttctggaagctgagaagtccaagacagaggggccacatctcgtgaggaccttcttcctgtgtcactccatggcagaaagcaaaagggcaaaagagggcaaaacaaagaaaacaagagagggccaaacttggcttttataacaaacccactcttgattacaaactcactctcatgataacgacattaatccatttgtaagattagagctttcatgatctattaatctcttcttaaaagtcccacctgtcaatatgattgcactggggattaaatttccaacacatgaactttaggagagacatccaaaccatagcattctcactctttttctaattcaaatactttgtgagcttcagacataaggagatactaaaatagatacagaatcaagcagttacaggctacatttaaaataacattatggagtgatcagtccttaggctaatatgttagtttttttttcagcgcatttacttagccgcatgcttgttcactcccgctagtttttggccgttgtcctccaatactttatgcctttcctaatatactgcaagtggatcacctattatttctcttttaaacatttaataatgtcctatatcttaaattggtttctctttggacgagctatccattatcaaccttcctgaaagtgcaattaaaatacaaactaggcatttacgatgatgtatgatattcttcatttaaaacccccaaataaacctctttctgttcaatgcctctaccccataattatacatatgaactacactggatcatctcctttgagaatattgatgatcttatgttcatctatggaactcccactatgttcaaagcagtgatatccaaagggtgaaattcctagtaagtatgaataaataatatatttcataagggaagccaaaagccaaggattcttctctcattttgattttcctttttcaattcatgtggcaactgacattatttttattatgggctatagtttcctccgtaacaaatagttgtattgtcagtttggttctagagattttgggagtaactctcttctctggaaaggttacaaatacccggattgaggactggaagcttgagccataactccattagctttcagagtatttcagggtgatttcagagtatttctgaggaaccagtccaaatggaataatatttttttctggtactgttaagtctggtccgaaactttttttccttacatcaagatgggggaaggaagtgccaataccaggagaaaaagaaaaaaatctattcttcaaaagctgagaaagaaatataggaaagctccaaaccattaactggggatactaagaaagcaggtacttaaaataccttgatttaattatttaaaaaattaactttattcatctaagctgtgaaataattttcattcggaatataataagtattaataatactttgatgggaatgacataattcaacaactaaaaagtgaaattgagggttgaactgacttttcagtatgcctgtatacatacatacatgtttgtatgtatacatatatttttaattaaatgctgagaaattacagagaaagacagagctatagcaatttaaatcatgtttttatcattctcgtcttcttttgcaatataaatgaagtttgaaaaaattttagtcgactagttggccatgaaatggtttggtttttatgcatatttacttaaatgtgtgagacatttaaaaaaatatcttcaggctcttcagcctattcaatttttctttttaattgtggggtgaaaatgcttatgaacaatttgcattgtcaattgacagcctccatgtgaatggtttatatctctcacactaatatgtgcaaaatattattgccccctcttatgcatatctagcaacaccaacatcttagagacattaaaaaaggtgtaaaggtaagggaagagtttccactgcattgaaaaatatttttgtattatttttatgttactgagacttattattaaacttgctttctaacattgctttctaattgctccaagctttcaaaaaaccaaaactttgaaagctatgataataagccatttttaatgcacccaaagaacaaaataggtatatgtgaaggtaagcgcaaaacttaaaagtaatttgttgttaccctttctctaaagcacaaaagatctgagtttgtatcctggtgcatcctctctttgagtgggcaagttatttaaccttttcaacatttctaaatctctctaaaattgttgtgagaataaacataaataatttcatgtatacatctattaccttacaaaaataaggcactgaataaatgatcattattattttttgtgttatcaggaaaagtgtgattttaagaacaggaagtggcatctaaatctgtaagtatatggaagttctttatctgtagtagacataggctggtttatattgtcctaagccacaacaaaagtaaaagaagtttatatgtattaaattatagttgaccctttaacaacatggaggttagggttgctgacaccccatgtagtccaaaattttcatataacttttgactccctaaaaactttactaatagtctactattgactggaagacttactgataacataaatagtcaatcgatacacatgttgtatgttatatgtattatatactgtgttcttacaagtaagtaagctagagaaaagaaaatgttaataagaacatgagcaagagaaaatacatttattattcagtaagtggaagtggatcatcataaaggtctttattcctgtcatcttcacattgagtaggctgaggaggacgaggaataggagcagttgtggcgaaagaaaatctgtgtataagtggacctgcacagcttgaacccatgttgttcaagggttgactgtattttaaagacagatcaattgcacaagagttagaatagccagcactgttaaacagggacaggtacaattttgtataatgcagagaactctatctctagtaattttaaagataattcacagaacaatttgcatttgccagtttgtaacacttaccttttacaaatgatggtgtgtatccataaattcaggaaacagtttattacagtggttagagcataaactttgaaagcagccagtgatgtgtcagaatcagcacttgagataattattaactaaatattcagatactgcaaacctgtagttaaactatgggtagcttgaaattggccatggtggagcatttacactgtggaaattgacaaacgcataaatctaggtctccctcacaaccaccacctgatttgccagaaactactgattcagatatgtatctgtttaaatgccaactttaacacttaatagtttatagcctttagtatcttatcttgcctttctttctcgcaacttccaaatctagaaaatgatataattatttatagtcataaggttgctttgaggattgtgttaacttatataatcatctagtgcacattcaataaatggtggttcatattaataagccaaaatcataaaaaagacaacaagaaagagaaaagcagaaactaaaggaaaaggaataactttctgagaacagtgaatttttgctgtattaataagtatcattaggcaagagattctagaactataatagagaaaaaaaaatccactccagtcaatgcttcactcaccacgaagagattgtttggtgtttgttcactctctccaaagggtgggataggagaatcagttctactagacatgttttcttggttagcttgttgctctgggattggctcatataagctatccatagagccctcctgcaatacagagatttatgagtcaaggaataacagaataataattttcctttaaaaggtacctaatttatacacccacctttatatagtactttatttaaattatcctgggcatagggattaagagtttacagtatgctaactttcaacagtgaacaatacagtaaagccaggaattattacacagccaggaattactattaccaccattattacagagccaagaatttaaacaagagtttaagtgttgcagaggcaggcacacaatgagggaattcctcaagaggtatgttgaagacattaagctcaaaaaactaaataaatgccttttgagacaccaataaactgtgttggttacagatttgagttacatgtatgtctctaattggtaccacctccctttataagaaatacagtctgctctacttagctttctcaactgtaaagtagcagtttcaatggcagaggaggcgaagtaagatggcagaatagaaagctccactgatcgtttctccacaataaggacaccaagttaacaactatctacacagaaaaacaacaccctcataagaatcaaaattcaggtgagcactcatagtacctggttttaacatcaaatcactaaaagaggcactgaagagatagaaaaaacagtcccgaatctccgacgccactcctcccctaccgtggcacctgcggcctggtgtggagagcatctctgggatctggggaagggagaacacagccatcgtgcggcattgaacttagtgctgtcctgttagagaagaaagaaaacccagaccaaactcagctgatgcccagccatagagggagcatttaaacgagccctggccagaagggaatctctgatcccaatggtccaaggttgagtgcctgcaaaccttgccgcccagggctgcagcactctgtgtctccagtaaacttgaaaggcagtctagaacacaaggactgcaactcctatgtgtgtctcagtgtgaactaagcccagagacagtagactgagggggcatgtaacacactgagacaccggttggggcagccaagggagtgcaggcatcaccctgcccctaaccctaggctgcatatcttgaggctccaaaagagaccccttccttctgcttgaggagagacggaagtgtagggaggcctttgtcttgcatcgagggtaccagctcagccatagcataatagggcactgataagagtcatgaggtaccccccttccgggccctagctcccagatgacatttctaggcaaccttgggccagaaggaaaccgctgccctgaaggaaagggttcagtcctggcagtattcattacctgctaaccgaagagcccttgggccctgaatagccagcagtgatacccaggtactacatcaagggccttgggaaagcctctgagacttagtggctttagatgagactcagcacattactagctgtggtggctacagaggaaaacttctgtttgagaaaagcagagggaaatgcaaaggggactttatcttgcactttaggtaccagcacagccacatgggggtagagcactgactgggctcttgtaatctcttattccaggactgtatgcttggatggcatttctggacatgccctgggccagaggggagtccagtgccctgcagggtaaatcccaggccaggtagcattcacaaaaagctgacttaagagaccttgggccttaagagagcatctgtggtagtctagcagtactccttgtacctagggtggtatggctacagagtgaggctcctctgtctttaaaaactggagagaagagtgggaaggctggtgtggtttgagtgccagctcagctgtaatacaataacaccaggtagacttctaatgttttagactctaatccctgactcctggactgcacttctggactcacccagggcctgggggccttcagtgccctgaagggaagcacagaggcatgacaggatttgccacctgctgactgtagagcctgagcgctttgagtgaacacaggcagtagccagggagtggttacagcaggccttgggcaagacccagtgttgtgctggcttcaggtctgacccagcacagtcacagcagtggtagccacaggggtgccagtgtcattccacttccagctttcagtaactcataacacagagagagactctgtatgtttgggagaaagtaataaaagagaacaagagtctctgactggtcatccagggagttctcccatatctggtcgaaaaccatcaatgaggtactttgagtctgcaagaaccacagtgctactgggcttgggatatcccctaaagcagatacagcttagattacaaaacacaagtcctttcaaatatctggaaagcctcctcaagagggacagctacaaataatccaagacagtgaagactagaataaatacttaactccttaatgcccacacaccgaagaacatctactagcatcaacaccatccagaaaaacaggacctcaccaactaaactaaataaggcaccagggaccaatcctggagaaagagatatgtgacctttcagataatttgaaatagatgtgttgaggaaactcaaaagaaattcaaaataacacggataaggaattcagaattctatccaataaattaacaaataaactgaaatgattaaaaagaatcaagcagaaatcctggaactgaaaaatgcaattggcacactgaagaatgcatcagagtcctttaatagcagaatgtataagcagaagaaagaattagtgagcctaaagacagctattttaaaatacacagtcagaggagacaaaagaaaaaagaacaaaaaacaacgtagcgcaactacaggatctagaaaattgcctcaaaagggcaaatctaagagttattggccttaaagaggacgtagataaagagatagggatagaaagtttattcaaaaggataataacagagaacttcccaaacctagagaaagatatcagtagccaagtacaagaaggttatagaacaccaagcagatttaaccctaggaagactacctcaaggtatttaataatcaaatcccaactatcaaggataaagaaagaattctaaaagccacaagagaaaagaaacaaataacatacaattgagcgcctatatgtccggcaacagacttttcagtggaaaccttacaggccaggagagagtagcatgacatatttaaagtgcttaaggaaaataatttttaccccagaataatgtatctggtgaaaatatctttcaaacataaagaaataaagactttcccaggcatacaaaagctgagggatttcaagaacgccaggtcagtcctataagaaatgctaaagggagtacttcaatcagaaagaaaaggacagtaatgagcaataaataatcacctgaaggtacaaaactcactggtaatagtaagtacacagacatatacagaatattataacactgtaactgtggtgtgtaaaataatcttaagtaggaagattaaagaatgaaccaatgaaagataataactacaacagcttttcaagacactgtcagtacaataagacataaatagaagcaatgaaaagttaaaaagcagggagacaaagttaatgtatagagttttaattagttttctttttgcttgtttgtttgtgcaaatagtgttaagttgtcagcaggttaaaataatgagtcataatatttgcaaacctcatggtaaactcaaaccaaaaaacatacaatgaatatacaagaattaaaaagcaagaaactaaaccatgtctccagacaaagtcaccttcactagacaaagacaggaaggagagaaagaaggaagataagaccataaaacaacccgaaaacaagtaataaatggcaagagtaagtccttaattatcaataataacattgaatgtaaatgaactaaaatctccaatcaaaagacatagactggctgcatgaatgaaaaaacataacccatcaatctgttgcctgcaagaaacacacttcaactataaaagcacatatatatggctagccagttttcccagcaccatttattaaatagggaatcctttccccattgcttgtttttctcaggtttgtcaaagatcagatagttgtagatatgcgacattatttctgagggctctgttctgttccattgatctatatctctgttttggtaccagtaccatgctgttttggttactgcagccttgtagtatagtttgaagtcaggtagtgtgatgcctccagctttgttcttttggcttaggattgacttggcaatgtgggctcttttttggttccctatgaactttaaagtagttttttccaattctgtgaagaaaggcattggtagcttgatggggatggcattaaatctgtaaattaccttgggcagtatggccattttcacgatattgattcttcctaaccatgagcatggaatgttcttccatttgtttgtgtcctcttttatttccttgagcattggtttgtagttctccttgaagaggtccttcacatcccttgtaagttggattcctaggtattttattctctttgaagcaattgtgaatgggagttcactcatgatttggctctctgtttgtctgttgttggtgtataagaatgcttgtgatttttgtacattgattttgtatcctgagactttgctgaagttgcttatcagcttaaggagattttgggctgagacaatggagttttctagatatacaatcatgtcgtctgcgaacagggacaatttgacttcctcttttcctaattgaataccctttatttccttctcctgcctaattgccctggccagaacttccaacactatgttgaataggagtggtgagagagggcatccctgtcttgtgccagttttcaaagggaatgcttccagtttttgcccattcagtatgatattggctgtgggtttgtcatagatagctcttattattttgaaatacatcccatcaatacctaatttattgagagtttttagcatgaagggaaaactggctagccatatgtagaaagctgaaactggatcccttccttacaccttatccaaaaatcaattcaagatggattaaagacttaaacgttagacctaaaaccataaaaaccctagaagaaaacctaggcattaccattcagaacataggcatgggcaaggacttcatgtctaaaacaccaaaagcaatggcaacaaaagccaaaattgacaaatgggatctaattaaactaaagagcttctgcacagcaaaagaaactaccatcagagtaaacaggcaacctaaaaaatgggagaaaattttcacaacctactcatctgacaaagggctaatatccagaatctacaatgaactcaaacaaatttacaagaataaaacaaacaaccccatcaaaaagtgggcaaaggatatgaacagacacttctcaaaagaagacatttatgcagccaaaaaacacatgaaaaaatgctcatcatcactggccatcagagaaatgcaaatcaaaaccacaatgagataccatctcacaccagttagaatggcgatcattaaaaagtcaggaaacaacaggtgctggagaggatgtggagaaataggaacacttttacactgtgggtgggactgtaaactagttcaaccattgtggaagtcagtgtggtgattcctcagggatctagaactagaaataccatttgacccagccatcccattactgggtatatacccaaaggactataaatcatgctgctataaagacacatgcacacgtatgtttattgcggcattattcacaatagcaaagacttggaaccaacccaaatgcccaacaatgatggactggattaagaaaatgtggcacatatacaccatggaatactatgcagccataaaaaaggatgagttcatgtcctttgtagggacatggatgaaattggaaatcatcattgtcagtaaaaactatcacaagaacaaaaaacccaacacagcatattctcactcataggtgggaattgcacaatgagatcacatggacacaggaaggggaacatcatactctggggactgttgtggggtggggggagggggggagggatagcattgggagatatacctaatgctagatgacgagttagtgggtgcagcgcaccagcatggcacatgtatacatatgtaactaacctgcacattgtgcacatgtaccctaaaacttaaagtataacaataaaagaaaaaattttaaaaaaagttatgaaaaaaataaattaattaaagcacatacagactggctgggtgcagtgggtcacatctgtgatcccagcactttgaaaggccaaggtggatggatcacctgaggtcacgagtttcagaccagtctgaaaaacctggttaaaccccatgtctactaaaaatacaaaaattagccaggtgtgatggcacacacctgtaatcccagctactcaggaggctgaggtaggagaatctcttgaacccaggaggcggacattgcagtgagccaagatcataccactgcactccaggctgggtgacggagtgagacactgtctcaaaacacacacacacacacacacacacacacacacacacacacacacagaaagagagaaaatgaagggatggaaaaagatattctatgccaatgaaaaccaaaaaagaacagaagtcactaaacttatatcagataaaatagatttcaacacaaaatctataagaagagacaaagaaggtcactatttaatgataaagggatcaattcagcaagatgatataaacattttgaatatatatatgcacccaacactggagtactcaggcatataaaggaaacatttttagagataaagagggataggaccaaatacaataatagctagagactttaacatcccattttcagcttagaaaagatcttccagacagaaaatcaacaaagaaacatcagactgaatcttcactatagagtaaattgatctaatagatatttacagaacatttcagccaaaagctgcagaatactcattcttttccctagaaagtggatcattctcaagaatacaacatatgtaaaacaaaaaagtcttaaaacattaaataagttgaaataatatcaagcatcttctcttaccacaatggaataaaaccagaaactaataagaataggaattttggaaactatacaacatggaaattaaacaatatgctcctgagtgaccagtggtcaatgaagagattaagaaggaaattggaaaatttcttgaaagaaatgataacagaaacacaacataccaaaacctatgggatacaccaaaggcagtactaagagggaagtttatagcaataaatgactacatcaaaaaagatgaataactgcaaatgaacaacccaacaatgcatcctaaggaactagaaaagtaagagcaaaccaaaccccaaattagtagaagaaacaaaataataaaggtcagagccaaaattaatgaaattgaagtttaaaaaaatacaaaagattaatgacaaaaaaggttgttttttgaaaagttaaacaaagttaacaaacttttagacagactgaaaaaaagagataaagcccaaataaataaaatcagaaaagaaaaagtagacactacaactgataatgcagaaactcaaagcatcattagtggctactatgagcaactatataccaatatatttaaaaaatctagaagaaatggatgaattcctagatgcatacaacctaccaagattgaaccaagaggaaatccaaaacctgaaaagaccaataacaagttacaagatcaaagccatgaaaaaagaaatctcccactaaagaaaagcccagaacctgacagcttcacttctgaattctaccaaacctttaaagaagaattaataccaatcttactcaaactattccaaaaagtggaggagaggggaatgcttccaaactcattctatgaggccaatattactgtgataccaaaaccagacaaagacacatcaaaaaaaaaagaagactacaggccaatatttctgatgaatattaatgcaaaactcctcaacaaaatactaccaaactaaattcaacaacaatatattagaaagatcattcatcgtccaagtgagatttatcccagggatgcaaagatagttcaacatattcaaatcaatcagtatgatacatcatatccacagaatgaagtttaaaaacaatattattatatcaatttatactaaaaaatcattttaaaaaatttgacattccttcatgataaaaaaatacctaaaaaaactgagtctagaaggaacatacctcaacataataaaagccttatacaatagacccacagctagtatcatactgactggggaaaagatgaaagcctttcctctaagatctggaatataacctggctcaccagtgttattccacatagtactggaagtcctagctagagaaattagacaaggaaagatatacatggcatccaaattagaaatgaagaagtcaaattatacctgtttgcagatgatatgatatgatttggaaaaccctaaaaattcctcaggaaaactgttagaactaataaacaaatttagcaacgttgcaggatacaatttcaacataaaataccagtagcatttctatgagaacaggcaacaatataaaaaagaaattaaaaagtaatcctatttacactagccacacataaaattaaatcccaaagtgaaagatctctataataaaagctataagatattgctgaaatcaattgaggaggacataaaaaatttgaaaatatttaatgaaaaatagtttatgttcacagatttattgaaaaataatataggttcatggattgaaagacaattttgttaaaatgtccattctactcaaagcaaactacagattcaatgcaacctcagtaaaaataccagtgacattcttcacagaaatggaaaaaaaatcctaaaatttatatgggaccacaaaagacacagaatagccaaagctatcctaagcaaaaagaacaaaactggagaaatcacattacctgacttcaaattagactacagagctatagtaacctaaacagaatggtgctggcataaatacagacacacagaccaatgtaaaaaatagagaactcagtaacaaatcagcacacttacagtgaactcatttttgacaaagatgtcaagaacacacactggggaaaagacagtctcttcaataaatagtgctggaaaaactaaatattcaaatgcagaagaatgaaattaggcccccatctatcaccatatatgtaaataaaatcaaaatggattcaagacttaaatctaagacttcaaactatgaaactagaagaaaacattagggaaaatcttcaagacattggtctgggaaaggatttcttgagcaattccccacaactataggcaaccaaagcaaaactgaacaaatcgtctcgtatgttgaaaagcttccgcacagaaaaagatataatcaacaaagtgaagaaacaacccacagaatgggagaaaacatttgcacaatatccatctgacgtgggattaataaccagaacacacatggaactcaaacaactctataggaaaaagtctaataatctgatcaaaaaatgggcaaaagaatttgaatagacatttccaaaagaggacatacaaatggcaaacaggcatgtgaaaaagtgctcaacgtcatttatcatcagagaaatgcaaatcaaaactacaatgagatgttatctcaccatagttaaaaatgccttatatccaaaacacaggcactagtaaatgctggtgaagatgtggagaaaaaggaaccctatttcactgttggcgggaatataaattagtacaaccactatggagaacagtttggaggttccccaaaaacaaaaaattgagctaacatatgctccagcaatctcactgctgggtatatacttcccaatttgttgcagtactgttacaatagctaagatttggacacaacctaagtgtctatcaacagatgaatggataaagaaaatatggtacatatacacaatggagtatggttcaatcatcaaaaaagaatgaaatccagtcatttgcaacaacataattagaactggagatgattatggtaagtgaaataattcagtcactgaaagacaaacatcgcatgttctcacttatctgtggaatctaaaaatcaaaacaattgaacttgtgtacattgagattagaaggatggttaccagaggctaggaagagtaatggcattctgggaggaagctggggatggttaatgggtacaaagcaatagaaagaatgaatatgagctactatttgatagcacaatagggtgactattgtcaataataacttaatcgtacattttaaaataatttaaagggtgtaagtggaatgtttttaactcaaaggataaatgcttgcgggaatggataccccattctccatgatgtgcttatttcacattgcatgtctgtatcaaatcatctcatgtactccataaatatatatacctactatgtacctacaaaaattttaaaaatttgaaagaatgaaaaagcatcaagggcaaatgatacacattgcaacacacacacacacacacagcaggaagctatgaggataaaataaattcaaggcatgctttgaaatagcaaaaatattttacaagtacagtcaagaaattaatattaatgtttagaacattaataataaaaatattatttattcatttttatccttgtatgaaaaaatgaatttaaaatgcatgagtttggatttaaaatcattgtgtaatgtattataacttctttgtatttgggaagcaaatttattaatcaaattgacttttttaaaaagatataattagtctagttatgacatcatctagaagcagtcttaaaagagagaggtagacagtatacacttagcatattgaaaagttctaggtatattaacatataagtaaagtgaagattggatgccttgtctacctttagaacatttggccaatatgatttgctgtttccgcttttaagtaacccctgttccaaacacattacaaactactgggaaaattattaagaactaagtaagtcatgagtgctctaaaatacgtaaacatgtagggaaacctaacagaaatacaaagtagtgagtgaaactaaagttttagacatattaagctcccatcccaaaacagacagcattggacagatcttaaaccctgaggggtagcatgcaatcgatgtcctctacatgaggcaaactccatgatggaaatacagggcctatggtagcaaccactgctataaaagagggctgaaaaaagcttctgccaacagctgctagggctcttgcttacaagaagatatgggccagagaagcaaaatttaacaacacggccagcaaaacagaatatgaaacaagctaccaatagttcagtgtctagattagtaatagttcatatatctgcttggaataagatctctggaccaccaatgtaagccctggtttttaattggggcatcaggaagacatgagattttttgcctcactagtagataaagcaaggcgaagaagccaggaaagaaagaaagaaagagagaaagagagagagaagaagaaaaagagttgtcattctaaattagccaaagcacatgaagagatcaaatgctgaggaagagagccaactgaattgacaatcagaaaattaaaccatttaattccagatgaaattaaaatcataaaacagatggagagataatttaagaaagaatatatataatctccaaagagctaaataaaaatgtaatattaaagaaataatttatgatgaaaccaaaacagaaatgaaacaaaaatcattaaataggaacaaagaacaattacaaagtcttgaaaatgaataatcacagaaatttatattaaataatcaaaaattaaactctagacctttcataagagagaattagaaaatgctgagttcacttagggtgcagcatagaaggataaatagaaaacatgatacacacaggtaaaaggttagaagatatattaaaagatgacaaaatactactaatagaaactctagaaaaagaaaatgatggaatattcctattaatgcaagaaaacaacagatcaattttaggtattaacatagtttttaaaatcctaaataaaatatcaacaaaatcaaatagtacctataaaactacattaagaccaattagtgtttaatatagaaatgtaagaatgcttcaatattttgatacagattaaaatatttaaaaggaagttaatctcaataaatatttaaggcatttgaaaaattttaaagtttacccacgtcaaaatcttagcaaattgggaaaaggcaggacttccttaacctgagtagagttatttaaaaaaaatttcctcatgaagactgaattataaataattatatgagcattagaaataagagtaggatggctgatatcatagcattcctacttgtcaatattatggaagctaaagaagttgagaataacataaatgctaaggaaaggaatactttatagattatttgtacagaaaatctgagaaaaccacagagtatctctcagaattcttcaagatcagcaaaattatttatttggatatcaatatactaataatgtgtctctaaatcagcatcaacaaacttggagaaaaattcacaatggcatccaaaattcttggatgcctaacaataaaattatcaaaaggtaagcaagatatcatagagaaaattacaaaatattattgaaggctatgaaagaattgaataaagagttatctatgtttgtggatgaaaagacctagcaccataatgaagtcaatttcccctaaaaatggtgtaaaattcaagttcatttcagtcaaaatcccatcaaaggtattcatataatttgacaatatgaacctaagtttatatagaaaaaagacgaagtccaaactttcaagaaggacaaatggggagcagggtattcttctgaataagactcacttggcagcagaattattaatattttaataagtgcttaaaagaacaagtaaaatgaaagggatagaaatgaaccaatgggaaagaataaagaatccaaataaagacagaggcagcatttcaaattattgaagaaattgtgcaggagtaattgatttgtaacctcatgggttacaaagacatgttaaatgcaataactatatgatgagctcaacaagaaaaatcactgtgcctcaaatgagcaagttttctaaaagcctcatcatgacgtaaaactctaagaaaaattgtggagtcagagtggcatgtataaaaggatatttctgcctcccttatgaaagatagaccccatttcaagtttatagatccaaaataatagcaatcacctttaatggattatttatagtatccttggttcagaatgggtagttcattaagtttctgcctttatgtttctcttaaaaaccccatttactaaaagatttacaattttcccctacacttaaataaaagatgtttaactctttcattctttctttagcagtgatctttatgtgacacataatatttaaaatcacctgcttcccagagatttaaaggtcagtgtttttacatataccttcattttttttaattcaagaatctttccattaaaccagtggtttttattctcttttcttaaatgcagtgtcccatatgttcacattcctacagccatggataaaacatgttttggattttgcataagttcctggcaaaagctgtacccccacccctttttcaaaggttataacagcacagtagggtgtcacaacactgtggttgagaacctacactaaattatgttatgtatttattccacaagaaggaataaaaaacacctaagataatgtttattttttaagtacctcatacacattttcttattaaagcaactgaatttgataacataaactttgcaatgattcaacaaaagactagggttcttgatggttccgtctaatgaaatatgtttctgaacaagtaacttcttaaggacaactttaacagacagaaaagagttacagtcatattgagtccatgagtcaggacttcgaggcaatcctttttaagtaagtgctcccttccctatatcacagaggaagacaatcaagctcattatatggttatatgtcttcagcagcagcattacaaacgtatgtcacgccacgctgaaccatgctatgttatagaaacattagcatactgattatattaccattcaaaatgatttcagaaagcaatcgtctttggtgccacactgcctatttccatgggaagtatattcatataaaccacatatagctcttttagatcaactagaaaagtatgcacaataccacttaaatcacctgaaatgggatttctgccatcagatttatacggcacaaagcaaagttgagagctggcagttattttgtaaattggactatatgggcaacaagaactcgatgattcagcctcccacaactcataattgcattttatttttcaagatgctctaagattaaaccccttatcttggcttaaaatgcctcctgtttaggtattacaacgtatgtcagcaccatctctactgcttatgttaatcttatgtgcaattaggaaagaaaacaaacatcagaactaggccatcttactttcccaaatgagagggatctcccatcgacatcttgaaaaaccaatgaatagacataatgccctgctgtaaacacagaaatgaataaaattatttttgaaatccatttttaagcattggcagatggtcacaattgcaggttagagttataaagtattttcagatccatgactacctgataactttcactgatccacttcaggctaaggaaaaaaaagtaataatgtgaaaacgaatttgagaggtgcttatacccttgagtaagcacatctccaggactggattaatctattgtaccttgcatttacagtgtggtgcaactcagaaaactacctccatggaagtttaaccaagccagcattgaaaggaattcattactcaaggaacaaagaagaaattttgattcctgggatgtctcaaagcaaagcaagcaacacaaagcctgcatattttgcaaaattttgtctcataacaaatagaagaaaattatttctcaaaaatactgttcccagaacattatacttaaaaattcaacatcaaaatgataaataatagtaattgttgcagaactctttttaatacttgtctttgagtagagttggcttaagtgctttaatgaaagcatcctttctcactgttctttgtgatgtgaactttctgagatgctaagtgtatgaatatcatcacataagaagtttagaatatatcctaatttcattccttttgacacagtaaaattaaaatgagaacataaatgctgcaaataaaggaacttaccagcgaaatgcagaaaagattcattttgaccagcttcactctcttgttgccctgctttgaaaaatatgattgcctcttgtagctctctcttgccttcacagctgtttggccagttctcatgggagattattacaaagtaaaatccctgccataatccaggggattcagagaccattatcaaataatataggcttttgttgaacaaacaatttcctaaattaatgaagaacgctgatgcataacatgagagaatgagacttaccacgatctgtgtaaacagatttcaaaggtggcaatgatagtcctaaaacctgcagtgaaaatgcattggaaacaactacaggcaaacctggagaaaatattattcttcaggttaaaagtaacatcttcctcttaaaagtggtaggtcaagggtccatctcatatttcttcccatctcccattcctattttctctttcaacaattaacaaaacgtttgattcgctacatgacaagatatagagataaacacatttttaaatggcaagatatgcaaagtgcataaatctaaaatgtaccactttaaccatttttaagtaaacagttcagtaacattaagtacctctacattgttgggcaactgtcaccaccatgaatctccagaaccatttcatctttcctaactcaaaccccatacccattaaacactaactccccatttcccctgcccctcagcccctggaaacagcctttctactttctgtctctctaaatttgactactctacatgctttctgtaagtggaatcaatatttgccatctggtggctgacttacctcacttagcataatctcttcaaggtgcatccatgcaatagcatgtgccacagtttccttcatttttaagactaaataatattcctttttgtgtatatatcacattttgcttatccacttgtttgttgataaacacttggattagttctaccttttgactattgtgaataagactgctatgaacatagatgtacatatatctgtttgagtccctgctttcaattcttttgggtatatatccagaaggggattgtttgattttttgttaattccatgttaaagaggaaacaccatattgtttttctcactgactgcgtcatttacattctcacctacagtacacaaaggttccaatttctttgcacccttgctggcccttgttattttctgttttttgtttgttcatgtttttttttttaatagtggctaccctgaatgtgaaatggtatctcatggttttgatttgcatttgcctagtgattagtgatgatgggcatctttttatttgtttattagccatttgtgtactttcttcggattaatgtttataccagccctttgctcatttttaaaatttggttccagcctgggtgccagaacgagactccatctcaaaaaaaaaaaaatttgtttcctttagtttttggttttgttattgttgaattgtaggtgttccttacatattctggatatctcttctcagatatgtgatttgcaaataatttctcccattcaatgagctacttttttactctgctaatagtgtcctttgatgcacagaagtatttttttctttttaatttgataaactctaaattatctacttttgtttttgttacctgtgcttttggtgtcaaataaatcattgccaaatccaatgtcaggatgatttttcccaatgttttcttctaataacttatacttttatctctttgggactttgtcaattttgaattactttttgtatatgctgtaatgtaagggtccaactttattgttttgcatgtgtatattccatttgtccaacaccatttgttgaaaggctgtactttccccattgaatggtcttgacagatttgctgacatttgaccacataaatgaaggtttatttctgggctctccattctattgcattggtctacatgtctgtttctatgccagtatcacactgttttaattactgtgcgcttcgaactaagttttgaaattaatgacttttgcatattgtctcactccaaaaaaaaaaacaaccttaaaaatgttcttttttttgttttgttttgttttttgataagaaaattgaggctcagaagaataagtaacttgccaaggtcaaaactagaaaatggtaaattctggaatctagtccagggatatctagttccaaattttatgctttttatattaactatatcatcttgtgtaaacttgaggatgatacttagcttctgcgtcttcagtaaactcatctgtacaatggcctgttaaacctagctatttgaaaacatcagctaaaactaagtgatttttttggtattcatttaggtcttttatttcttgatatgcttgaaatctaattgtcttttaaatgcactaatagttctgaaagttaaatttatttttaaattttttattatttttcattttttaattaacaaatgaaaattgtatatatttatgaaatacaacatgatgttttgaaatatgtatgtgaaatggttaaattaaactaatatatgcatcaccttacatatttatttgtggtaagaacacttaaaatctactctcttagcagttttcacatgtacaatatattgtaattaactaacagcgccatgttgtacaatagacctcctgaacttattcttcctaactaaaattgtgtatcttttgaccatcgtctcctccaattactcctcgaatcccccagagccttgtaatcatcattctgctctttgcgtctatgaattcgacttttttagattccgcattagtgggaacatgcagtgtttatctctctgtttctcgcttatttcacttaacgtaatatcctccaaactcatcgatgttgtcacaaataacaggatttccttcattttaaaaacaatagtatttcactgtgtataataccacattttccagcaatcccactactggctatatatctaaaggaaatgaagtctgtatgttagagagatatttgtacctccatgttcattgcagcattattcccagttgccaagatatggaatcaacttaagtgcccatcaacagatgaataaataaagttaaatttagatcttgcaaataaatttcttcatcacctggtcctggacttaattttgttaagtaacatttatttccaataaccttattagaaataagatattctaaaggaaggtatctatagccccttgatcttaattagcaacacctggagatttacattggtaccttctgctttaaagtgttatcagttaagaatgctttcagttgcaggtaatagactacatgactgagagtgtttaatcaagaaggattattgttcacgtataagaacaggtctatggattgacaattgtcactgaaggagagggtcagcaagatcagtcatgagtactgtctatagttcccttgcccttcctttcatgatttgaagatggctgcagaagttcatagcgttaaatcctcacacagttgctttcgaacactggaaacagacatcacatgcaccaatgtcaagcagcccttcctgtttggcatcctttccatcaggcctcccaagagcctcagtacccctataggtttcactatttctgcatacttttccaagttagtacttttgaagtgtattatttaagaaatattttgagatacaatattaaaatttaatcaaaagcaaaactaaatgaaactaggactttgagtttcttctttataatcttttattttaggagctataatattatttcaaattatgattaaaaaaagatgaaaaaattttcacatatactcaaaagtagactataataattcctttatatgcccctcacatatattcaacaattatcaagatattgcaaaagttacttcatatgtcctgttttatcccctttttctttccagctaaagtattttaaagcaagtctcagcatcatgttatttcactcctacacatttcattcatctctaaacatttttcactttttttaggcaatcagaatgccattcataaatctaaaaatagtttcctgattacttcaaataccttcctttgtcattcccctcacagaaaggtatggtctgtttctccaatctcttgaatgtcggctgagactatgactaactgaaacttggactatggcagaaatatcactgcgctagttgtaaatctacctttttccttttacacatttatttgaattgaaaaataaaaattgtatgcatttatggtgtccagtgtgatgatttgacatacgtatacattgtgaaataaataaatcaaactagtaacatatccatcacctcgaatacttatcaattttttatggtgaaaacatttacaatctaatcccttagcaatttttaaatatacaaaactattattattaactataatcatcatgctgtacaataggtctccagaacttattacaaagtttcagttaagcctagcttttaagaaagcttctggcttctattttctcctctttggaacccagctgtcttattgtgaggagcccaagcagcatgtaaagagacccacatgaaggagaatcgagagctccggtgtctgtcccatctcgtctgcatgatgacatgggcaccagtgtgctcaccctgggaatgaggtcatcttgaaagtaagccccagatgagccaccttagctgatagcagaggaaccccatccccaacccctgagagccctgaccaaattgaaaaattgtgagaaaataaatgattgttattttaagccactaagtactgggatggtttgttatgtgataaaataaaaaaaagcactgtctgtaattaaaattttcaatgaccttaaagaaagcaagaaggaccagaaggaggaggaaggggaagaagaaaaggaagaaaaatcttctcatttgctccatgtgaatcaaaatccaaacaatgaccacatttgacacttggttgtcatgcctctcaagtctctgtaattcagaactctcactctctcttctttctcattaattttttgcaaaggataggtcttgtgaaatgtacatcctgaatttttttctggtttccttctttgtgtatcacttaacttcttcttctatctctgggatacactataaatggaaattaactctttcctaaatggaagttgattcgattctgagtcaaccttaaaaagtgcaaaaacttttgataagtattgggtactgtacttgacatcgtatcaggaagcactcaatatttcccatatttattaatactaagataatttcaactattaattaccttaacttaaattgcctaattaggagctacaatatgatggtttttgttttgttttgttttttgagacagagtcttgatctgtcacccaggctgaagtgcaatggctcgatctcggcttactgcaacctcagcctcccaggttcaagcaattctcctgcctcagcctcctgagtatttgggatggggttacaggctcgtgccactacgcccagctaatttttgtatttttagtagagacggggtttcatcatgttggccaggctggtctcgaactcctgacctcatgatcctcccccctcggcctcccaaaatgctgggattacaggcgtgagccactgcacctggcccagaatgttttcttttagttatggaagtgactgcacatcaattacctggaaaatttggtaaagtagaaatttttctaatcaactagtgctgtggttaacctaaaatacagtttatagaggaacaattataacgtgaaaattttcaaaaagtttgtgcctgtgtaagtccattttcacactgctataaagaatacctgagactgggtaattattgaagaaaaaaggaggcttaattgactcacagtttcacatggctggagaggcctcagggaaccgacagtcatggtggaaggctaaggagaagcaagcaccttcttcacaaggcagcaggagagagcaagaacaaagggagaagtgccacttttaaaccatcagatctcgtgagaactcactcactatcaaaagaacaccataggggaaactgcccccatgatacaatcacctcccagaaggtccctccctggacatgtgaggattacaatttgaggtgagatttgggtggggacagagagccgaatcatatcagtgctctctggtcattttttcagtggtgtccaataaattgctttttctcctcatcctcctcttcctcttccctcttctttctctccctctctctgtctgcatgtcatgacaatatgaacttatagacttttatatgtacaatgtgcttcaattgatacacccatatttttcatgatgctcaattttgtcttttatttggccattgactttcagtgagtgtgttactatgcccctttgaaccaacttattgttctttgagtttcttgaattctagcacaacaggatgtctcagcctcattttgtaagttttcttcttcagatctagagtcagcaatccaatcaaaaaaatcaaaaatattttaatagtttctgaaaggccacatctatgtgccattttattttgctgttctttgtttgctctgattcttgcttcagtgtcttaagaataccacttttttctcacatatacagcctcatgtatgttttaaagagcttatttaattaaactatctattggtggaaaatgaatatgtaagaatagagaataagacaagacctttggttaatattgaataagcaataacttataatcctttcttaatgtgcactactgtcatttgggaggtggtagatattggtagagataatactgcagtagacaactttaaaaatctttgtaaacatttatttccctgtagttatttttcaacttgaaattttccttacttctgtgcctggtagaggctatacaaacaataaaatatctaaacattatttttgcaaaatgctctgacttgtttaaaattactcccggatacccattcctcaaaagccattgcttattcaaagaggagaagagttctggtagctacaacaaatgccccattgcatttcctaacaatcttctcttctcatacactgaaaatcaactattttgtatctatttccattacctcgtaagaattcctataccttggaagatgacaattacttttcatattaacacgcagttgtcacgacattgtgcaaggccacaagctttggagccaggcagacctgtgtgtgaattcaacaacttactatgaagtctttgacaagtcacttaacttctctaaatgtaaatttccacttttattaaaaaaaaagataaatccattttgaagccttttatgaaaattgacatcaacgtaagcaaagcaaaattcaggaaaaatttaacaaactgttattatacattagtgtggttataactttcaattaaactaagatactaagagcagacattaaatttcaccgtctgattgaaagagaaggaaagaagtgtgtcacagccaaagtgcagcagagcaaaagccacaaaaatctggattctatacctagcactacatcaaaggaattctgtagcaaagccttccaaactcaaatggtttcttcttcttcatctacaaaacaaaacagatataactagtttttctcaacatttgtcatataacagcacagaaaaacaaatggaaggtggctaaaggacccactagtaatccccaagttcccaacagttgacaatatgtcaactgtttaacataaaacatccacagccattcatggaatatctgtatgtaaccacatacaagatgtgaagctctggtctggaagacatctgaagtccctctatctcaatgatatttgtgatggaaatgtaagagcagggaatggcaacattagaataggaaacagggaacacgtttcaagctagatagaggtcaatgtaatctttatattcaaatcttatagattgctgcataaaattatagcatagacctcagacctcaccatatccccagatagcacttcctaaagttagattgaaaaaagataaatcatatagtcctttttattgcaaaagaatgagtcttagcttaataagtaatcatttattgtcccaagtctattgccaaaatttcctgaaagatagatgtaaagttatgaatttcatagaagcataattaacacaattagaagcataattagctaaacacaaaaatacttattttggaaataattcatagaaaggattaacatcttatctattatttggtaggtctaggtaacattttatccccatttttaaacatccactaccaaaggaagagagagacagagtgagagaaagggagagagagaaactctaacaagatgcacatttttgtgacaaacaataagtatcttaccttttcagagactgattttgaatgatagttagggagaaacgtatttgttacgtaaagacttacagaaatatgttgcttttgaaatactgaaatttcaagctttatctggtgatagcttttactgtttcttgcaaccaaagtagaatttgacaagggatatatatatatatatatatatatatatatatatatatatatatatatatcccttgtcaaagatgatagcttcttttgttttatggaagctctttagtttaattagatcccatttgtcaattttgcttttcgttgaaattgcttttggtgttttagtcatgaagcctttgcccatgcctatgtcctaaatggtatggcctaggttttcttctagagtttttatggatttaggtgttatgtttaaatctttaatcactcgagttaattttcatataaggtgtaaggaaggggtacagtttcagttttctgcatatggctagccagttttcccaacaccatttattaaatagggaatcctttccccattgcttgtttttgtcaggtttgtcaaagatcagatggctgtagatgcgtggttttatttttgaggcctctgttcagttctgttggtctatatatctgttttggtaccagtaccatgctgttttggttactgtagccttgtagtatagtttgaagtcaggttgcgtgatgcctccagctttgttctttttgcttaggattgtcttggctatataagctctaaaaaaagagtaaatttcatatggttccatatgaaatttaaagtagtttttctaattctgtgaagaaagtcaatgttagcttgatggaaatagcattgaatctataaattactttgggtagtgtggccattttcacgatattaattcttcctatccatgagcatggaatgttttcccatttgtttgtgtcctctctcatttccttgagcagtggtttgtagttctccttgaaaatattcttcacatcccttgtaagttgtattcataggtgttttattctaacccattttatgagtccagaatcatctggataccaaaacctggcagagacacaacaacaagaagaaaatttcaggccaatatccctgattgacattgatgtgaaaatcctcaataaaatactggcaagtcgaatccagcagcacattaaaaagcttatcagccacaatcaagttggcttcatcactgggatgcaaggctggttcaacatacacaaatcaataagtgtaatccatcatgtaaacagaaccaatgacaaaaacctcctgattatctcaatagatgtagaaaaggcctttgataaaattcaacaccccttcatgctaaaaacattcaataaactaggtattgatgcaacatgtctcaaaataataagggctatttatgacaagcccacagccaatatcatgctgaatgggcaaaagctttaagcattgaaatccggaacaagacaaggacgttctctctcaccactcctattcaatttagtatcagaagttctggccagggcaatcaggcaagagaaagaaataaaggtattcacataggaagatagaaatccaaattatctctctttgcagatgatatgattgtatatttagaaaatcccatcatctcagtccaaaaactccttaagctgataagcaacttcagcattctccggatataaaatcaatgtgcaaaaatcacaagcatacctatacaccaataatagacaaacagagagccaaatcatgagcaaactcccattcacaaatgctacaaagggtttttttttcttttttttaaaattatactttaagttctgggttacatgtgcagaacacatagttttgttacataggtataaacacatgccatggtggtttgctgcacccatcaacccgtcacctacattaggtatttctcctgatgttatccctccactacccccgccaacccaaacaggccctggtgtgtgatgttcctttccctgtgtccacatgttctctttgttcaactcccacttgtgagtgagaaaatgtggtgtttggttttctgatctcgtgatagtttgctgagaatgatggtttccggcttcatccatgtccctgcaaaggacatgaactcttcctttttatggctgcatagtattccatgctgtatttgtgccacattttcttaatccagtctatcattgatggacatttggtttggttccaagtctttgttattgtgaatagtgctgcaaaaaacatacatgtgcatgtgtctttatagcagaataatttataatcctttgggtatatgcccagtaatgggattgctgggtcagatggtatttctagttctagatccttgaggaatcaccaagtttttaagaagtttaagaaatgtgttttagaaattagtaatttgcagatacaatagagaagaaaaatgtttgctagtagggaaagggtctatcatttccctataatgctagtagggaaagggtctctgcacctcaacttcatctgtaaaagtgtgtggcataggactggttaatctcaaggtttttacctctttttccaaattcctgtagaaaactacagtgaataaaagatggctttaaactttgtaagcaaactagaataaattacatgtttaagctgtctgatgaaatgaaactaaatgaaaaaaggtatttaatttaaaagaatattttatgagtacaaataaaattgtcatttttttaaaattagtagccctttaaggtttgaatttaatagatataagtctgtatcaaaagatataactggcgtcttctacaaaacaaatttcaggagaaggcctgatcaccagccccagagagcactccacattagctccatcatgctgatgactccagaatagtgcatttttttccacctaaaatgaaattatttccctgataagactttgatatggttttgctctgtatccccacccaactctcctcttgtagctcccataattcccacgtgttgtgggagggacctggtgggaactgattgaatcatgggggcaggtctttcctgtgctgttctcgtgatagtgaatgggtatcatgagatctgatggttttaaaaacaggaatttctctgcacaagctctctctttgcctgctgccatccacataagatgtgacttgctcctccttgccttcctccatgattgttaggcctccccagccatgtggaactgtaagtccagtaaacctctttattttgtaaatcgcccagtctcaagtatgtccttatcagcagcatgaaaacagactaatacagacttcatgacactaggaagggcacatggctctaatgtctctttgcattcggtacagtacaaatttggtataaaaaaagacatgccatgagagaaccaacaatgtcagctctccaaatttctctttttgttgatgcagcatttatataccaagttatccagaatggcctgaggctgtatcagtctttagcctgatgttttgtgtgataaaactaaaatagtctatatttttatgcaattggccaaaccaaaatactcacacactgatatattgattcttccaggccaccaggcacagcctggaagggctagagatcttagctctctctcctccagctgtgtaatatgtcaatgtgtcataaaaatatcagattatctatgtactatgatgagataaagattgggagccatggtgctgggatgacaacctctgaagagcaaatgtttgaagcagtttttagaataaaaaaaataagagacaattttcttctcaatttcttaatggtaattgtttcttttcagggaataacatcactgtcatttttttaaaaattgagacaaaacttacatatagtaaatgtacaatatagctcaataactttttacatatagacacatctatagaaccaccatccaaatgaagatacaaatttctagtgcttcagaagaccacgttgtgtccctctcagccagtaccatctccacctccaacccaaggtaatcactattctatcatcatgtattgttttgcctgttttattttaatgtaaattatatcatgcagcatatactttaaaaatctgacttcttttattcaacattatgtctgagattcattcatggtctagtatattcttcttcatatgatgtggcatcctgttatgtaactattccataatttatttacccttgctactattgattgagaatggttattttcccctatttcagtcctcatgaatgaagctcctctgagcattcctatataccttttgatggaaatatgcactaatttctctttggttttatacaaacatatatatacatatgtatatatgtatatatacacacgtatgtatatatgtatatatgtatatatacatacatatgtatatatgtatatatgtatatatacatacatatgtatatatgtatatatatacacacatatatatacacacacatatatatataactaagataagaacatgtctatctatctacctctctatataagaatagaaaattgggtaatgggttaggtgtatgcctagcttttgtagatattggcatatcattttctaaagtgattgcatcccatcaacaatgaaggagaattctagctgtttcatatcaccatcaaatcttggtattgttcatctttaatgttttgttctgatgtgtgtcttaactggggctttaccaatattgaggcccttttcatatgattcttagccattttgacactatgaaatgtgtgttaaaattgatcacacatctctaattaagttatctgctttttttttttgtatgagttccttattctgttgataagtaatttgacaaataaatacatgttacaaaaatcttttcccagcctgtggctaacttctcatcctcttaattttatcactttataaacagaagttctcaacttcaatgtaatccaatttgttaatcttttttttttttttttgcattttttgtgtcttattaagaaatctttactcatttcgaagtcgtgaagatattctccatgctttattctagaagttttattgatttagcttttacactttaggtctgtgatccatctcaaattcagttctgtgtttgatgtgaggtaggagttgaggttcttttttgtttttcattgatatatccaattaacccagcacaattttttaagaagaccactgattcctatagaaattcatgacacacttatcatatcaaggcactattttagcgtggatatatttttggaatagccataattccacttgtctttgtgcaaatattatactttcttaattactacagctttagagtaagtcctcctatctggtacagctctgctgtttttccttaataatatcttggctatcttaggttcttaagtatatatttttaaagcattagattaaaaatctaaagaaaagtttgagtttcatttagccactgactacacattacctcatgaaagaatttaacttccctttctgtttcctcacttgtaaaatgtgcagtgcttgaattagacaatcccaaagacttttgcatttgtgattttctggcccaattcacacagaaagggacagcaactaatattcataaataaaccacaggaaacctccattgaacggatgatggcctaaatgcagtcaatttttttcttcacaaatgttatttcacatttaaaataatgcattttgaaactggggttagagactacttgtttaatataatatcaacagatttacaaattcattgtatttctaattgcctctttaaaatgtgacaaaacacattgcttttattgtaaaattttgataatattcaaaacattggctcacatatatttctctattcctaggacaaaaatgaaagtctgcaataatcagcaccactctacctctccaaataggatctttaacccaaacccatcctcttcattttaccagacttataccacaatgccataatttgttttgctctcaaaattttcctaattcctcatgcctaaaatattctcctgctttattttcaccaattcacacctaatagtttctttacaaatcatatctgcctgtctttcttgagtcacttttttctactcacttttgtactttgtactcatccacctgcactgcattacatagtctatctctatacacaaatttattaaacattttattctcatctccctacttagattctaagcttctattttgaatggtcagatgtggagtactgagtttagtattatgcaactatagctagatctttgggaagaacacttaggttgtgagtacctcctctgtgccagtcatgtgttctctcatttcacgatagccctgtgaggtatatccgtctcatttttaaaatgagaaaatgatatttattaaaattaggtaacatcctcagtgtcacttgtagcatctgagcctttcctgccatcatggaaatggggatgctaacaaattggctcagaaggcccagctgaccattgggatggggaggagggggtcctacagggcacagactaggaacaaaggagcgcttcttatcagagacaagaggcactggggccagaaaagcagactaagcaagaagtgatacaatcaggtcaacgtctgggctgagagatataagatagatgccaaagccagaggagcagagtgtgaaacagggagataaaatggagcagagcctgctttgaaatgcagagatgcgattgaaagagggaggatgtacagcaacagaaaaggcagcaggtgattaataggcattttctggatgcaaaaattaataaataaaagaataacttataagggataaatgagagagtggcaacaaaaccatatttaaacatttgcaacctgggtaactggcaaattattagtatgatttaatagaattagagaattcggaagaaaatgaaagcttgagtagtgcacatcgaaatgcattttggatgggacatttagccatcaatgtttaacaggcaattgaaaatgtatggagctcagaagaaaagtagatactggagtctgcagcttacaaaatgctttacaatattttaccttattctctaaaataactaataaaaaaactggggttgagaaaagttgagtaacccccacaaagtggcacagttaatgggtggataacctagaatttgaattcaggcttcttaccataaagttgagtgacttccccaaagtggcacagttaatgggtggataatctggaatttgaattcaggcttcttatcataaagttcagtggtggataatctagaattcgaattcaggctcttaccataaagttcagtgctcattttattacattttactgcctttcatataagaacgagcaaatcatctaaagaaaaagagggtgtcagatacaggattctatttgggctgcaaatatgataatgccttatgctaacgtgcatagcttcgggtgacaacaaactgaaatttatcaaaaacaggttgacctcccccttgtgaaggattttttttattcattccaagagttgcttgcttattgcaattttgcctgctggtgtggacatagctgagagcatcacctgcctgccaaaaaaagtaaatatgctggaagctgttaagtggattaaaacttggtaccacaaagtagtgcccaataacatagtcagaaattccacctcagccaaagatgttcctaaaaactcaaaaacaaaaaggagaggaaagaacattttaggaggatttatgaggtagaagatacgaagaaattatacaatatacaagcaaagaaaacaaatttttgaaaatttgccagatagctggaagccaaaattgtgaaaagaaaaatccctatgagaactgctagttttataaaatattctgggaatttaagaaaaggtaaattaaataaattatgcattagttatattataattatgctgctgagctggcatccttattttctccaaattctatcaatcagtcaaagaaagtcacagtgcatggtcagattcaaagtcacattgcaatggatgtaaacacagacaccaagaacaattgcagtcattttgttgtcagcctgcaactaccagtaaccagtggtttgatttcaggcagttcatttctcttggcctcagtttctttatctccaagatatgacttaggactttctctgtaggattccttacactcctctgttcctaaagcaacaactttcaaaactgccttacaggcaaattagaggacttttctgtatctcaaaaaatacatatatatataaacaaagtgacatgtagttgcttcagtacgtgtaaagttacttattaaaaagcaaaaatgccatatagaacataaaaagtgaaataggaagatgaaataaaatcaaacaacattaagttactattgcaagtcgcaaatgattgaagatggcttgtttagctgtttgccaacactaaaccaaattgtccacttcatgtcctaaatggcccagcttggcactggatcataacccatattccactttatagatttttcttcatcagtaattcagggtgtgaaagtgatcgatattagaattactcagactgttaatatcgtttaaattaaatggttaattgcttcattttctattttacttggaccatgaagattgaaccaattttatgaagcccaaactttagacaagcaggtagtaagtgaaggaagtcagtcaccagccaacagcacttcctgttttcatatgcggataagcagactctcgttagaaaccccaactgccagagaagacaaaatgctttacttctctcagactgacgaggaaacagtggctaacatagaaattgttattgtccagaaataaaaacaagctttctttaaatgctaaggaaaaaaataaagatttagtattttcctctggtttcatttgcaaacatctgtatgcactgtttttcttcaggatacacagttgaaatgtcatattactggaatctggagatcactttgattaaattttgccttgcataaagcaggctaaaagaagttaaccctaactgcctccaccaataagaaagaatgtatctgaattcagcacaaatggaaacttgtaatgttctacagtcaggtgagaatgaggaaatgctcagatctaaaaggagctgttgctgtaaggaaaccatttccttgatatctgcatgttcatcatcttaagtctcaggcccccagacagctgtctcttcaacttcaggaaattagacgccaaaaagaagacctgaaaaactgaaacatgctaagcctgtacgttgcacaggggccaggcaaaactatatttaggattaattttgagagctctgggtggtttttgttttctgtgttgtgttgttgtttttaatttgcagggaagcctggatgttagagtgattcgtgtacacatcttaggtagagaagctaataagtagatgtaaagaagtaaaaccgaattcattaaaacctagagcattcattgacttgtttattgctgagtgctgagtagcaatccacacacggtgcagtatttatttttttcaaaacagaaacccccataacctatatgatgttaacaaagggaaattgcaaaacaataacaaaaaaagcattttggaaaataaactcattttcttcgcattcttctttccattgcttctgaaaatgtttgaaaatcagtagcattataaactttacagtctcatttcccaaattggctttcttctttttctcctcccaatccttggttatatttgtcaccttctgtttctatagcacatggctgaagacctagcattgcatctgcaacaagtactctgactttcttcatgaatataagtttacaggaatgcctgtataaaaaaaaaaacccatagtaagagattacaaatatcacatccctcttaaatcagcttcctgacttcctttatcccttcatgggtctggtatgtcagcaacacttgacaatgtgaggttaaactacttgctctgcttatgatctcattccctcctgctatctctttcagaacaaagaccttatactatcagttgatgaattttcagcctctttgcctctacctgttatatcactgccatctacacatcagctcaagccattcctgtctttaaaaaacaccatctctgaccttaaaccttcctccattaaccatcattctctttttccttcccctgaaagccatgttcttgcaaagactaatttataatcacttggtcactgcatttattgttcagtctaccataattagaattatgtcccatcattctatggaacgtgatttgctgaaggttattaatgattcaaatttttccaatctaatacactcattgcggacatcatctatctggagctggtagcacagttgagagagagcttctttactcctagagctggctcctcccttgaatggataaaccattctcctggtcttgtgctatctcttggaccgttcgctctcagtcttccctacggcctcaattcagctgactctgtctactgcttaacatcccacagccaccactgctgtctagctccactcctcgatccccagtcctggaaaccagtctttgaaatcttccctttactctggcaattttctcttcactcgtcttgctgcctctattctctttcacatccactttatctatcccctcactgtcagcgtgatctctcaaaatatgatgaaactacttttatctaaaacctttaaactccttcctggaactccttatcatgttcccttagcacaaatttccccagtagcaaccctgaataagggtttacacgctgatagtttatttgggagcacaacgaacaccaacaagggaatggggaactgatacacagacaggaaggcagggaagactagagcttaatcctgctacaatatcctggggaattgctacaaaactcatgtctccgagttatcctaatgaagggagaaggttgtgggatacatatacaacaaatctagtcagtctgcttctgggtatggggggactcacttccgcagcacttttgggaatgggacggggggactcacttccttcagcacttctggcctaccaagaatggccagagaaccttctagagatccaacaaagccccaaggcacagcttgaagttggccctggagcacagtgaactgggcaaggtacaaagatatggtgagactctgacagaatctccaacacgtggcttacaaattttatttatgtcacattatcttaccctatctcttgtggcaccctgactcgccttcttgcacacaccgtagggaaaaccttggatcttgcatgatgtattgctctgctctagtctgtgcatctctagaatgcccttctcctccttgctcactggtcaacacctgataattcaacagccatctcaattgttacctctgtcacaatccctgtcctgaaattccggtgggtactaaccaatgcttcccttgaattcccacgtgctatgctcatgatttgattccctcctgctgtataaatatcgatactacagccttgaacacttccctgcaagttatgttgctgtatgctgctaaataagcctttggtgctaaagcagtgaatttaggtcacagaagctccaaatataaaaataagatgctgtatttcaggtgagcaattactcccataactatttgtagtgaagttgcctactatactgatttaccttgttgagcaaagtaaacccctgaacatatgactaaaattcaaaggtataaaagtcaaacaatagagttggaccttataagaagagtttcatcccaagagttaaaacattttatagaattttcaattatactttgccctttggaaacacccacttttatgacataataaaaaaatgcaacaataaaaaatgttgacataattggccaatccccacccctacccacacacccacactacatacaagacaatgatggtgtagcccgaaagaatctcatgactgtgggacagccctacttcacaagggctggtgatattccttagttagaggatgacatgcattctgcatttgacatatgcaagatggatcagggatatttcagtaaaatgtatgaaaaagcaggttgtgtgaaaattgaatgttgctatagcaaacagcacttggattatattaaggaggagtctctggaggttagaagcttgtcaaattattactgtcagaacaaagagatcagcatggcctcttgaagccaaagtcaaaaacatcaatttgagaaaaactggataacaagaggggtaaacacatttttttttattgaattacctcgtttgcatgtcgggagggcatattttgaactaattttatggattctcaggcccttcaaggtacaatggaaagaacgttaaacttgcagtaaaggattgtattagtcccttcttgtgctgctataagaaatacctgagactgggtaatttataaaggaaagaggtttaatggactcacagttccacatagcgggggaggcctcacaatcatggtagaagaggaaggaaaaacaaaggggcatcttacatggcagcaggcaagagacagtgtgcaggggaattcccccttagaaaactatcagatcttgtgagatgtattcactttcatgaggacggcatggaaagacccacccccccatgattcaattacctcccactgggtctctccatgacacgtggggattattaaaattcaaggtgaggtttaggtggggacacagagtcaaaccatatcaatgaccgtggcacctacttgcctgccaactcctttcaatcaatagcataatcccttccttttaggaactggtcaaggatctaattttaagttgtctttttttcaatgccctgtctcaagcccaaccaaagcaagtgatattaaatagggaaagtgtaaaacaatggtatgcaacctcactgcacattagaatcacctggggaactcataaaacctatggatgcctggacccatccaagattaattaaaagagataaagcccaggaattttaaaattccctccaggtgattccaatgtgacttcaagtttatgaaccactgacccagcggcataggcatcgcctgacaacttgttagaaatgcaaattcttgggcaaaaatgcaaatttttgtttcagactcactgaaacaaaaatcctgtgggtgatgtccagaaagctgtgttttaacgactctccaggtaatactaatactaaaatttgaggacccatgtccacctattttcactgatgctttatctgcgtgtttttaatctatattctagctccccagagaaatagctaacaacctcacatagatattatgcctaaccttacacttttactaaagttcactacagaaacccaatgaaaagagtgggctatatgtgatttagaattcaaaagccatagattccaaagcagtttgcccatttgctagagaggttacgttcagcaagttcttaaaagtctccaagtgtcagttttctcagctttcaatgagagtaatagtagtacttatagcaatgagctgttgggaggaaaaaatcagaataccgacgtaaagctctagtataacgtctcatatataatagcactcaggaaaggctggctctataaagaaactttctgaaaatttgaaaatatataaataaatagagaaaaacctggaaaagattgtatcaattaaaacaaatcattctcaggatttaagactagaaaatatcctgaccatattaactcctattagtctatgaaagatgtacgatagctcattgtttctttcccatcagaggtggttaacatgaaggtcagaactgggcaccaagctataaattggtagtaactttactgaacttagttattattttttcatattacatgcactcatttataatataatttagctccttatctgtaatgtttgtttcaaaacaaatctgtgtattattttaagaaaccacaaatccttttgaaacaaaggcaaaatgtgaagaaatgattaatcgtgttgccttagaaaaatcaagaaccatggaatactgtgcagccataaaatgaatgagttcatgtcttttgcagggacatggatgaaatagaaaccatcatcctcagcaaacaaacacaggaacagaaaaccaaacactgcatgttctcacttataagtgggagctgaacaatgagaacacatggacacagggaggggaacattgcacaccagggcctgttgtgggggaggagagcaagggaagggatagcattaggacaaatacctaatgcatgtggggcttgaaacgatgacaggttaatgggtgcagcaaacccccatggcacatgtatacctatgtaacaaacctgcacattcagcgcatgtatcccagaacttaataaaataaaataagaaaatcaagaaccactatgtccgtatctcataaaaatctttgagtctgtttcataatattccttcttggggtaaattttgttgctagaaaatttactttcaatggtccctctttaacaaaaaacagtaatgctcactcttttaaaaaaataaagtaaaaaaaaaattatttctgccaacccaccagatttcacaatggtaatgtgggccaaccacaaatcagttattgtgtgctccttcaatgttcccctctgtgtatatttgaactgagattactaaaatagataaatgtgcattttttattttataaatagtttgtacagctctgtatatagtattctttgtctatatgtgtgtttgtatttaaggatatgtttatgtttttctctctctaaatgatagaattgtggatttaattttctactttctaattgctgtattttcaattgttttctgaaacagtatatgttgctttttaaatcaagggaaaatacagataatttaatgctttttagaatttcccattaaaataatttccattcaggaacaaactagagaacagtctgagaatgtgtgatggttgttgtcatcccagtactcctattcagatgacaggcctgattcattctcctgcaaagaacttctgtgtatcattgtctggcatgcgcttaaggagtcgtgattctctgcccatgttttcacaaaagtaattctccactcatactttctgaaaactctctaccttactatatgcaagttgggtggatattgtgtggcacatggaaaactctattgttttgcaaagaatatgggagaagatcatttaggaacaaaaatgctattaattattctgtcagatatacaggtgagatttatgtgagtttaatgttgtctttttctcagctgtgctatccctgacctagaattctagaaataatagattgctagataaaaggctgatcatgcatctccacatctactttttgccaagcctttaaaactaggccaaatatcttactctttcaaaaagttgtcacattataagtgaaagctctaaagaaaggcttttgttttacagcctagatgactgagtgtatctaacatgtctgtacataaacgtagttgtatgggtaccattgaaccaatgttcaaattagatagacacttcaaagacattaatatgttattgtaacctagaattaagaaaggaagttcagactaaaagtttatacagaaatattcagtagaaaactgaaaacatttttagttatttaaatttgccttaaaaataaacctacaaaatgtggatcaagtagggggataaatatatgacaagaataatatattacatatgtcatactttagtgtctctgaatatttagaattaataattgtggctataaaatggttataaaaactgttttagctaattaaatttataattttagacaatagtagggttacatttttagcttaactaatctgtagattcctcttcctgttaacaaaagcaaaagaaagaaaggaaatgaggaagaaaggagggaacagggagagaggaaggaaaggaaggaagtgctgtggtctgaatggtagtgttcccccagaatgtgtgttaggacctaatacccaatgtgatagtattaagaaatgcagcctttaggaggtgattaggtcacctcttaaattaggttagtgcttataaaatgaggcctgagggaccctgtttggctgttttaccaagttaggacacagagaaggtgccatctatgagaaacaggcccacatcagacaccaactctgctggcaccttgatcttggacctcccagtctccagaaccatgagcaataatttctgttgtttataaattacccagtctaaggcgttttgttatagtagcctgaatggagaaagcaaaagaggaaaggagagagagacagagagagaaagagaggagagaagaaggaaggaaggaaagaagaaaggaagaaaggaaggtaggaaggagggaaggaaggaaggcagggagggagggagggaagggaaggggaaaaaaacaaacaagcgagagggagggaggcagggaggaagaaaggaaggagagaaggaaggagggtaggggagaggaatctatttcttttctttgttttttgagacagagtctcagtcactctgtcacccaggctggagtgcagtgacatgatctccactcactgcaaactctgcctcctgggttcaagcaattcttatgcctcagcctcccgagtagctaggattatagctgcatgtcaccacacccagctaatttttgtatttttagtagagacgaggttttaccatgttagccaggctcgtcttgaattcctgaccacaggtgatctgccctcctaggcctcccaaagtgctgagattccaggcatgagccaccgtgcccggctgggaggaatcaatctcttaaatgtagcaagggccttttgaaatctaaataaaacacaaaagggcaaaacattgactagccgaacactggtcttctgacccatctggggtctcagcctgggctacactgagctacttcttgtggtgccttgaagtcagttaatttcacttcctgttttctgggccacttcacctctccactatatccaattaatcaatactttctagtaataccacatcgaataataaaactcacatcagaagccaccatcactcccacctcatttttaatggcccatgccttattgaccagctctgtaattacttaccaggctcactgcatgccatttactttagcaccaacaaactcattcccttgctgaccggtgtggatatgccactcccctacctaagtcagtgctttttcttcatctaaagtaccatatgttaatctggagtttgagtcttgaaataccttctaaaatctatatacatttgggtttttctgcatcagtgcttatttttcttggttgacaatgcactgcgtccttcatattctaaaacaggcctggaattcattcaagatgaatatcttcagaacaaagccaaagactttagcatagactgcaagaattatttttgagataaagtttcaatcttgttgcccaggctggagtgcagtggcacgatctcgggctgcccgggttcaagcaattctcctacctcagcccccagagtagctgggactgcaggtgtgcgccaccacgcccggctaatttttgtatttttagtagagacggggtttcaccatgttggccagaatggtctcaaactcctgaccttgtgatctgcccaccttggcctccaaacgtgctgggattacaggcatgagccactgcgtacagtcaactgcaagactttctatgatctaaccccaaaagacctctgccattccagggtcaccatctgccccaaacacttaatgcccagccatatcatactccttttaaggtcctctaactgcaccaactttctaacttttccatgtttttgcacatgttgcttctccttgtattttggactcttcaccatcatttattgtccaacttcaactcccttttcaaaatcaaattagaagtcactttttctgtgaaagtttctcagcctccactatgctaatatgcagttgatagctttatcttagtttgctgtggtacctgggcatatctctatcatgacaattttcaaataatattgtaggtgtgtatgcagctggcccactttgaagagtgggctaccagaaaaaagaagttgtattttattcttgttggtaatctcagagtccagcagtatctaacacttagtaagtgctcagtcaaactttgatgaggcaaagagcataaagtcagctgagcaagaagacagagacttttgatggaaacagaaaacttcagggccatatttcactcatgaaaaccatccccagggcaataactaattaatagcaggcatttggtagaggcgtgttgctgagagtgaacccctttaaaaatcgaaatgatagaaagtttttagttacattatgcactgacaaattacttgagcaaaagctgagaactaactgtctgcttatagcaaaaggaacttgaaataaggaagtgacatcccagggtgcaatcacatgttacttaagaaattcagcagaattttagcagtagaaaaatttagcaattgaaaccaaccctgaatagaattcttttcttagttccaattggctatgtataaccatttactcacaaggcaaaattggaaattaatattagaaatacctatcattccatttatagtaaataattatgctggattttactatatattgagttgcagatacagttgttcccaatccataattatgcttcgtttttttgttttttgagacggggtctcgctctgtcaccatgctgagagtgcagtggtgtgatctcggctcactgcaacctccgcctcctgggttcaagcgattcttgtgcctcagcctcctgagtagctgggattacaggcatgcaccaccacactcagctaatttttgtatttttagtagagatagggtttcaccatgttggccaggatggtctcgatttcctgaccttgtgatctgcccacctcagcctcccaatgtgctgagattacaggtgtgacataattattcttaattaaccattttgttgtttgtggtcttataaaatctttagttaaaagaaaacctgactgtcacaatcaaggttccaggccccggaatgagggacgccagatgagaaacgagacttagtgatgatttctataacaacatttatcccaaccacacattacatttgtaatctcttagaccttgtaaaggggattttattaaaactacaaaaagtaaacgtatatggatctaaataattaagacagagaagataaagttagcatctgaggctgcaggtaggatggatttcagctgagctggaactagagcagaagcaacctgtgagaagggttatagacagacgtgcgaaagaaggtgtttaagaagtgttgcaactttcattttcacattctcaatgttctcactctggtttttgtgtgaccccagactgatatgtcttccaaagcagtacccaatggctggaattcgtgtacattatcatttattattttaaatgttttcagagttattgtgatctcttctgccacaccaaatttatgcagagtccttggcaaagaatgtagtggacttgcccacattccactccattccctgtcctctgaccttcagcacagaccacagaacaatggttgagaacgcagactatgggagccagactgtctggtttccggtgtccgtgaccatgagcagactgtgtgctttgcattcttccatctgtctaatggggacaataatagttcctcccaggcttgttataaaaatgaatagttactgtcaactctaagcaaagctcttagatcagttcctggagcatcacaaggccctgtatgtgcttgcaaaataaataaatagctccactttgggcaggtaaagtgaagtgttgagtaaattgtttcttcatagtgaataaagaaacggttatggaatgcccagcataagccttaaacacatccactcttccccctgggtgaagccaacaatgatactagggggatagttatcattcctgcctgcaacccagaactgaggaaagaggaccaggaagaatatcagggctcctataaccttaccctttatttttgcaaataaaggaactgaaagagtttaaagaatttgctgaaagccacaccacatatttagtgtgagtcacaaacccatttcttgtgactatcagcttagctctctccattatactcatgtcattagagtggttatgacaggaaagcagaagaaaggccaggagtccaggggttccttgatgaaacaccatggagatgtaacaggcaaagaaagaagatggggccccaaaatataactttctctaccagttctgccagaacttctcagactggcttaagcaaataactttgcacaattttttcatcagctaagagaacagtttatgaatgccttaaataaatttgactattttttagcttaattgataagaaaatgcatttccatttacagaaactaaaagtaacctacttgaaaactcagtcctcaagctttagagtttgcgtgcactctgtaggaatgcataactgtaggaatggggttatgatttgcctttgggaattcttgaagtgagtctgtttactcttgtatttcagcacctagcccagtgcacagcattcagtgaatatttctgatttcctattttagtgtatatcagcggccctcaaactttactgaacatgagaatcacttggcagagcttgttaaaaaaaggtggattccctcaatacaacccctagaggagaatggcccagcaggcctgtggggcatttttaacaaggtgctcttgattctgagggaggcagtcttacataatgctcaaattggaaatataaataataagctcatatcaatttgtcacctttagaatttgaaccaaaatttcccccacctacacatgcctcacaaagctatgttataggtgctctctaactcacacgcctcagggatcccatcagcaccatgtttttttctagccagaattctaatgaaatgtaagagtagtattctcctcatgcaaaacttaattctgtcaactctttctcaatatttggttatttttgttagtgaggcttaattgcagagagctgtttagagaaatgttgaagggctaaatttgacattttcagcacaatggaagatttttgacctcctggactagagacttagtcaatatatcttcaagtctatccttttgcttgttttcaaatactataaattaggacaatgatctcagagtagggctcacatcatgagaggcaaggtgactgcggagcaattatatgactgatactagcctttgaggacaggtttccaccagaaggttgtctggagtcagtatgagacattctgaaaacaagtgatgtttcacatgcccacagatacacatttaggcccgaattctccatattcaaaggtctacggggttccagtgctcacctctgggggcttttttgttagtagatttggctctcataacaagtgacaagattatggctgacactcaagtctctggcttatgtggaaaatgtcattatttacaattttcctcctttggaaatattaaagaaaatacgtttggtggtttaattatcatcaaaaagtaattgagggagactgggtacatagaactatagtaggagttagaaagtgtaaattaatctatagaaaagtgatagctctagaaggctatgctataaacaaagtaacagacacactggccactgacaagttaaataagaaagaacctaacatgaatgtaagtacagagtcaagtatctgttgagtggatggacgcaaaggaatttgtggatttactactttccttacaccctctacactttccaaagcgtgacctggcacacttgaatagattcactgtgtgctgaaagagaccactcttattgctatttcaagggaaatattttaagacttgagatattatagaaacctgaacaaatagaaaatggaaaaaaataatcggagaacaaagtaatacagtctgcccaggcttgagtgaaaatcaaagtagcatggtgtattagtccgttctcatgttgctagtaaagtcatacctgagactgggtaatttataaatgaaaggggtttaatggactcacagttccacatggctggggaggcctcacaattatggcagaaggcgaaggaagaacaaaggcttatctgacatggcagcaggcaagagagggtgtgcaggggaactgccctttataaatttgatctcctgagacttattcactaccacaagagcagcatgagaaaaacccaccccatgattcaattacctcccaccaggtccctcccacaacacatggggattatgggagctacaatccaagatgagatttgggtggggacacagccaagccatatcgcatggtattcattgatatgtaaatggaaccaataatcaactaacaatgataagccttgtactgagaaaatgacaaagaagaagtatatagggcccctgtttttaagaaacttacaaacgattggtagtgaagacaacataaatgcatatagattacaaaagtgtcagaaacaggtatgtgcacataacataggacagtggcaataaagttctaaaaattaaacaaagtttggacagagataaacggcctggtttcatggaaaggggtgtgggcgatgttttaagtgagggcagtggcaaatcttaaagtaggaaaataataaggcaagcaggatggcatagtttatgcctggctgcagacgggaggtgagagtgatgtgcaacacaaaataagaacagcaaggtacgggatgaacaaagaaagagagtcagaacattttattttgatgcaaattaaaactaagaattcttttcaagttatttaaagacagtgacataatcaaaaggatgattgcagaggatcattccttctacttataattggaggaggagaaggaaaaaaaagagttgagttctgctgacgtttttaatccattaattttaaggcatccacaaaggacaaagttagatcaaaaacgtgaaagaagttcacaacatttcatcagatgcccaggaggtcttggcagtaaaaatgaggacacctctgcaccagaccatgtcgcctgattgaaaaaacaaacaaacaaacaaaaaaaacctccaaaaaaactcttcttccatggaaacaaataatgtgttccacttctgccaaggtcattctgcatatacagatggcttaggtggctcagtgtagttaactcctctcctttggcaggggaacagagatttccatcatatccttctctgctcactgatatctggcccccagccttgcttgatcttgatactttggaaaaactgtgttgtctgttgtggtggttattttggtttctctaatcttaatgtcttctataacaattattagtggcaacatatagatgaagccaattcaacattacctcgaagagacgaaatgcttcatctttgccaaagatctcaattgccaaagttaggtggctgggagaagtctgttaacacagctccccttggctgggattcactccagtgtttgtaatttctctgaagacccattgagcaacctggcctgagtttgaatttgtgcaaaaaagcctctaaccaggtgagttgcacattgtttccagctcattagagatgttttggacaacttttctaatgaggtttgacatttgactaccatggcatatgtgtctttctccaccatgtcaccctccccctactctgtgcttcctttgctcttgctcaattttgtgagtgaatcatctgatctgtgccttatatgaccatgctctagtttgattaatctctctcatcaacgctccttcctgaatcctctgattaaatctggtcttctctctccccactccataatacatgggaccttttagcagctattaattatttaaaagaacgttactttctatcatgctcaagttggttgctgcagttttctgtccaccacgaggcttctgttaaaaattattgaacccaattaagaaagactttcaaacaccaagttctaaaaatctatagaagatattcttttcctgttacatcgacaaacttgataggttgggggaggaaatagatacaatatgtctcaccaaaatatacctctttattttatcctaaatggcatatggtactcaccaacagattgagaaagtgttatttacatcaaattatcagcaggtgactgtaaaacttctaggggtcattcccaaggaggatttactaatgggtatttctgatccaagcagtcaaaattctggcaaaattctacatatgtaagtcctttatataatgttattttttaattagcccagttcatgaattactgaaaagtgacacaataaattaactagttgtttggctcaaaacacacacacacacacacacaaaacaaaatggctggactgatttttcaccaatttgactgaattaactgaaagtttggtcgtggtatagagtctttagtaaatctgctcactaattaattttctgatggtgatgaattagctgataacagctaaaataagacatgacctttataagctgaaatcgcctgtgggtctaaagaggatgaagtaataatatagtgccaggtgcagctcgcatcaattaggtagaaaaaaataaacgatccagagagagttagactgacttgtctaagccaggtaggcttctgaagtcagagctgaccccacttcaaacgtggcataataatatggcagtgtaactaagagaagcacggtgcttagctgtattaatagaaaaacagcatgtcaggaaatgatgaaattctcattaacagtttccaagcagggctgatattcagctagtaagtaccagggtggcattcaggtaagagtgtttatgctgatcggtcaatgtccatcagtgttaaatatttaagattctgtgtatgtgaggaaagttagtgttataggatatattttgataccaattaaagggaaagtatgatcactgtaaaatttactgaagatatggactctactcttgccttttcccttaataagagcccaatgcaagttatctctgtaaccctttgtttcagtacagaaagttggacgaaataatattgattaccacttctagctctaaaattatgactcaaggaaaccttgtctctgaatttttcaaactgaatagtttcatatttaatttaaaatacaaaataaggtctacgccatttatacaagaattgtgtctttaaaaaaccccgaatcttagacatttagtaatatttaaaattttgcattactgctatgtgaatgtgaattgtatgcctctccataatagtaaaaatataaatgaataacataaaaataaaactttatcatcactcaaaaaaccaagacatcggttggggacactaatgtgaatgtgtaattttacttttcttccttctctttttatttttttaatttttaaaatttattttattttaattttttcagacaaggtctcactctgtcacccaagctggggtgcagtggcacaatcacagctcaatgcatccttgacctcccaggctcaagtgatcctcccacatcagcctcccaagtagctgggattacaggcatgcaccaccacgtctggctaattttttgtgggtttttttgtagagttttgccacgttgaccaggcaggtctcaaactcctgggcttgagtgatctgcccacctcagcctcaaagtactggcatttcaagtgtgagctgtggcacccagcatctttttttttttttgagatggagtcttgctctgtcgcccaggctagagtgcagtggcaccatctcggctcactgcaagctccacctcccgggttcacgccattctcctgcctcagcctcccaagtagctgggactacaggtgcccgccaccacgccctgttaatttttttgtatttttagtagagacggggtttcaccgtgttagccaggaccagcatctttttaaaaaaatccatacttatttttgatccattcaagaggttgtatatttggcagggggtgaggagaagtgactacattagtttgaatgaagagagaaagagaagccacccaaagtcaaattcacagaaaaaaaatttttatttgcttttgattgttcaaatgatcattctatataattcattaaccacatctcatgccattagaaaggagaacatgcagtattgatgccaaattagaacagacatggcccatgattttcctgaaaacaccaaggtacacattattattagtgtggatctcactgaatgtacgtagagctgaaatttttattagaaaaaaaaggaaagtctccacacactgctcctctctggtgcagctcatctgcaaagcagaagcgaaaagtctcctgagcctttcataatcccagctaaatgctttctcaggcattttccacatattgctcagaggtgtgttgattaaactaggcttattagactaattgctttgtttataagcacatgtgttagtacacgaaatggagagtgaagtcaatatgaagaaaaatactttatatagtaaacatttggccagcaaactgattctcctgactttcttcatccattatataacacacacacacacacacacacacacacacacacaggcaatgtgatgaagaataccaaatagaaagaaacaaaatcaattctggtaagtaaaagtgcacatttcttttgagattcttttctttttgagattagaagaggtgaatgcggggagggataagacattttctacttaagaacgaagaagtactaaacatgggggatttatttaacaagaaaagtcacatgattgagattagacatctctttctcaaggtgctcctgggagataatggctctcatacctatcattcagtgaaggcattggttttgtctggtaacataaaaatgaatctgaggacagacgttaactccttcatctctatctagccatgatgattttaagaataactctagaatatatttgttcttttacattattgtcatttctaaattttttaagtagtagagtctgtacgagtcaattttctttaaaacatggtaaacttaagacagttaaaaaatagaaactatcaaatatattctgtattctgtaaataaataatttaaagtaccattatctcatgcctgtaatcccagcactttggcagactgaggtgggtggatcacttgaggtcaggagttcaagatcagcctggccaacatggtgaaaccctgtctctactaaaaaaaaaaaattagtcaggcgtggtggagggtgcctgtaatcccagctacttgggaggctgaggttggagaattgcttgaaccccgaaggcagaggttgccgtgagctgagattgcgccactgtataatcaaggcaggaaaaaaaaagtttagcataaaacaggcagaagagttagaaaatgattcttcatttgtaaaataggtatatctacattgttttaaaataaactttaaaaaaagcaatgtttaatattcattttcactgtctatatttgcttatctcagaaaaaatgaatagaaatagataaatgttgatttttaataaatagatattgagcatactctcagcagcatctttgaataaaccatgacctcatcagcagcatctttgaataaaccatgacctcatcagcaaacattcccagcctcggcccctatcctgccttttcctttcaacatttggcccactaccatctgtttttcaccttcattatatgatgattataaccaaattttaacctgcttaatctgatctgtttatgggcagggagtgaagttgtaagcccttcttgtccttgaccccactccttgagcctgagcttcatacagtatggcacctgttccaagtgctgtagcacactttacactgtctcatcttgaggcattgagcatgtttgttcaaagtctacctcttcttcagtgcttcattctaattccacttactccaaaaagctttcccagatttctccagctcagaatagctgcctctctagctcagaatggctgcttccccaggactgtaagtcctttgcatgtaataattttacctggccttttgatatctatcaggtggtattatatactattacaggtgtcttgcatctcaactttgcaattagactgaaagttttcacagataccatttctgaacgcctatttatatgctaagggatattttaaatttttacatgaaattggcacagttgttattatcctcattctacaaatgagtaaatgaggcacaaaggttaagttacttgcctaggactatataaatactgtgtactagacctgaattggaattgtatatatttagaaagcagggatcgttgttggaatttgtgcctatccccttggccattttaatagtgctttatgtacattagatactgaaatactattttctgattgattggttttaagcactgacttaaaactgtccaggttattataagtaatgttctatggtatcaaccaaaactaatatttagtgctgtctaactgggcatgcagtagattggcactaggccaatgcaatcagtgatggtaagaaatataattcctgaggaggaaaacaaatgcttacatggatggctgatcaggtacatatgcttcagaaataaacaacgtttttgaccaagactgtctctccttgaaatgctacaaaactgatgagaagagacattaagattaaggatcatccgagaggatgatagcattctcttcagatttcaagaccaaggttcaagcacccctggaaaaaaaaatagttaattaaaatggctgtgaatggaggtaataatgaaaataagtaacaactagaaaaggatgagcatgcaccaactgggacagacaaaacaagcattcagaactgacaccaacaatgaagaactaatccagctgtcacagtgtatgttagctgggcatcagttctggttataaagtatgggttggctgaaatacttattgaacaaatgcttctttaatccctccacatggatcaactctagtctgttgtgactgtcctatccctggaattatcagaccttgcaaccatgttatttagaccatcctgatctgttcagctgtattgattacctactctgagataggcactgtactactaactccatagacaagacaaattaaacaccagtcttggtatatatgtacaattttgcagactcttcaccaaaacttatacttggtgcaattctaggagcggttttaccactaaaggatgaaaacacacgctttcctaacaagtctatattttagttggcttctctccagttgcagacactgaggcaaggattatatgcacgcttagctgtgcttaatcagtaggtgttatggactgaatgtttgtgtgccccctaaatttctatattgaaatctaatcctgaatgtgatgaaatttggaggtacagcctttgggaggtgtatcattcagggttctctagagggacagaactaatggaatatatataaatatatacttatatatttatatagtttatatatttatatataaaatatataaacttttatatatattatatattatatataatgcatataatatacattatctataaaattatatataatatataatatatataaaagtttatatgtaaagtatataatatataaatactttatataatatataaatgtaatatatatactttacatatataaagtatataatatataaaggagtttatatattatatacatataaactctttttcatatatatatatatatatatatatatatatatatataaaggggtgtttgttaagtattaactcacacgatcacaaggtcacacaataggccatttgcaggctaaggagcaaggagtgccagtccgagttccaaaactgaagaagttggagtccggtgtttgaagacaagaagcatccagcacaggagaaagatgtaggctgggaggctaggccagtttctcttttcacatttttctgcctacttatgttgtagcccctctggaggctcattagattgtgcccacccagattaagggtgggtcggcctttccaagcccattgactcaaatgttaatctcctttggcaacaccctcacagacacatccaggaccaatattttgtatccttcaatccaagcaagttgacactcagtattaaccatcacaggaggtaattaggtcatgaggatggagcccccatgatgggattagtgctcttattaaaaagaggctgagaactctttgaccctatttcctccatgtcaggatgcaaagaaaagacaatcatctgcgacaaggaagaagatccttaggaaaactcaacgaggcggcatcctgatctcagacttccagcctccagaactgtgagaaatgcctgtttaagccatctcatctacgataatttgttataattgcctgaactgactatacattgtactagtaacttgatagataaaaaaaaaattagacaagtctttggcaaccagcctggaagtcaacaccagtaacctaccaatattaccaataaattcctctttttttatgctttaggcctctacttcaaatccccaagggtagctgtgtaacaaaaatgctagtggtgttatttctactgaaataaaaagaggatccaagaggaagggtgacattctgatgatgtctactgcagtcttttatctttatgaaaattaagaactataagtaattagcacaataaatgtagctattgtcaaacaacaaagattaatatgctagtaaccgaaagagaagggataactcaaagtaaaaagcttctttatttctacattatttaacattagccccaatatgacaaattttctgcctttcaaaaatgtataggctaattttatgggacaagttacacacaaaatgagcttccataagcacgcatgataattcatgatataattagcaatttttacttgcaggctacagaatttaatttcatctaatttatccagaaaattaaaaagggtttattggttgtttacttgtgctgacttttggatccccaaaagaccaccagaaaaacccatagatcaagcaaatcttagtttaccatatctcctgtactaaataaagtcaacaacttgacagcatattagtattatcactgaagggctatcttcaagggaggataaatatgagattttaggccctggatatagtcattttaaaggaagtcatcaaggcagggaattatttgattagaatttataatagattggtggggacagtgaggcaagggccttaaaatgagctttgataagcaagctgctagtcttggttttaattgtctcacgatcttattttctggagacaaatatactggagcaagcagctaagcaatatttgttccacatcagtactgcctaatgcaggcacagggaattatgttggctttagttctcaataaatagcctatagactcaaaggaagaaagaaacaactgatttccagaaggttaggaactggggtatcttaaggaacaaaatggcattgatcccccaaaaatctctagggctccgcgatctggagccttgattcttatcacatttcatccctgagtatcttagtttaaggatcaaattctcaggaggatgccaggctatgtggcctgctctgtggtcaagagggacagggtctcaagttttattctccaaaaaagtcacatggagaggtaatttcccaaaagaagagaaattaagaagacagtaataaaagctatcccttataatggtcaaatccctctcaaacatctctctcctcataggtgttgaattttggctgaaattgtttcttttagttgttgctgaacaatttaaatgtattttttaagtcatttcttctttcctctcctctgattgcttccctacaactaactcccggggtcaaaacttgtcaattgtacatgtgtaatgagtttctctcacccaccctcttcctttctagtctatcgatatgtgccctaatctgttcctacaggatatttttttctaaattcctgcaatggcctcctacatgttctctacatttatcgaatctcttatgtacttcaaattattaatgttcttgaagcacagttgcaattcttttattctcagtttttcatgagtcagtcattccccattccctatcacataagtgtcacatgctttggtctcacatcaaaggccagttacaactgccagcagctctctatctggacttactttcagctactcacattcatgttagctttgttctaattaaacacatggcaatgttgccagggtactccctttgatttcttaactccaaactctttaagaacaaaatgtgggcctgattcacctttacagtccccacttccttctatggccatttgagtaactactctcatccactgaaactgttgccttcaatgctactgatctgaaaaagatcatgaggccaagttagggtccagtgggcaggaatgttgtgattgattattaatgtctgtcatgggcagtgggtagaggacagtagcagtatctgtgcctggaattttccatctttcattgtatatttaacaaatatttgttgagtgaaattcaacaagaatttagaataaagagatcctaggaaaaggctctttgagtctcctttggtttgagaaatgacaccacctttgtccacagagcccagcaattgtcagtaagaactgaagccacctgcattaacatgacaaatatttgttcctggaaattcttgctcaagaatataaggttataaatcaataaataacttcactatttgctttaggaaaattcctgcaaaccaacttgtctgggcaaatatttggtctcctatcaggacagtagattgctcacctgggcaaacaaatcacttatccaacttcagtttacttatcaggattcacgttaagactctcccgtcttgagtccaccaacatgaaaatattatgacacaaatatttcctaggcataatcagttctccatcttaaaccacacaccctaagacccacttaagcccagattctatccaaactctatataaatatcctctcctgacatttgccttcttgaagcatactaagcctcaataaagtaatgttctctgttactctagtaagtaaatcaacttagttttgtttgccaacatattttgtggggttttttttgatattttacacttggtagatttaaggaatgccacaatgtgatcaaattcatgaaactgagaagccttctgcaaacactaagttgtgccttcctagctcttgaacagtttcagtgacattttgagaaaaggtgaactgttgtctggtgctttgcaaagcaacatgacatctttacacttctacaatgcaaggaaaagaagattaattagccctagttactgtctagaggtcaaacacacaagacccgttggttctagagtaggagcatgtagaggtttccaaacaatgatgtatattagaatttccaggggacttgtttaaaatgaggataaagtcccatcttccagagactctgattcagaagtctatggcagggctcaggcatctgcataccacataatgttgcaaggggatcatggcccacactctttgaatctacactgtatctaaagtccagtcacttaagaccatttctactactggtcagttcccttaatggccattttatctaatattcaacttgcttttgactagttttatgtttatttgactgtcttctttttcatcttgtccttttttcaactttaagaatttcaaaaagaatggaggaagatgggaagagagagagagaaagagagtttcatcttgcctaattttattcatctgatatgttttctgtattttatgaataatgataatatatttctaatttttacattattttttgtgtttgcattgaaaactagttttaactaggcttttgggagacacttccttaaaaataatatttccagcaatattaatttattgataatacataaaacataaattataatcattatgcaatgagcataatgatccctaaagaaaatgtagtcaatttgtcaaatattaatttggtttaggagatgctttctgttaatgagcttattatatggatgatgtcaaaaatagcttcttctttcctgtaaaaaacctttggattttcatagtaaatgaagacatacagatccccccacacatcttcctgacaagatttacactgagggctagaaagagagcacaaagagaggatatggtgagaaggaattgtaggttattggagagcaaattttccttcttgacagcttgcctaggacttgcactgtgaccctgtttgtactaagctcttaagcagttcttctgaacaattgataatgaagggtgaaataactccaggaatattgcaagtaatgtcttttatacatacgtatacatatatatgtgtgtgtgtgtgtgtgtgtgtgtgtctaaagtaactgttaacaacttttttctagcaaaagccaatgccttatgttgttcatcttgacaaattcaaaaaaaagacaatatttacatatcaaagatagtaccttacttgcaaagaggcctgtttctccagataccttttttaacccctttggatgagatttttattgtcaagtttattggacaccagcttttctacaagcacgttgtattttattcattcagcaggaattgtaccaattaaacttgccttacaactttttgcattatggttggacttggtgattggcattaaaaatatatacttcacagcttttattatacataagctagataaattgttaatgctttagaactctctaggcaatatgaatgatggagatttctgtgctatccttgataaagttgaggatacagaaagcagttttaatcctctttttatactctgcctgtctgcctgtggaacaagttcagggagctgctgtttagcaggaacggagccacagacttaattttcaaagccagataaaagtacatggtcatatattctaaatctacttaaaatataaaataactaaataaactgacctaactaaagtaattgttgtccttaaacaatgaataagagtttttttgttttttgtttttttttgtatttttttttaaggctgaattcaggccaggtaaaatttccatttgtttgcattgttgttgtccaaagtgccaatgttttgtaaaattttagtctttcattaaaaataaaccactattttttatgcaagaagggacaatgataaatatagccagaggcaatcttttaattgtaccttaagtgttctgtcacctatccctaatgtcttcacttcagctttacaccttggattctattcaaccagatgcattttttcttctaattataatcaagatgtgtctacatgaagtggaaaatgtgaacaattatttagattgttcaaaaaaaaaataaaagcacatttcaactgaaaacatgccagtaattggagtagaatgaagtatttttgagatgagaattctttgaatcttacatttgtaaatagtttctcttcattttaaatttcttatagtttgtggctttgtggatctggctacagacctttttaaagtcatcgggagggcatttttgcttacaaacatagcaagttatctatgcctttaaacctctactctcagaaaagagaaggtttctgagaatgcatggcaagtatgctttacataccttgttggcaatgttcacagaaataaagctttggtcaaaggaaccagtttctctttggcatacagatgaatgacattcagaggcatcctttacataagaagacataaaattttctgtacctgacaatcccccaaattaccgcccttgtgtctcattccttcagaaccctgtgggggtgatccatttcttaacttctggtcctcttattccacacttcctggtgttctgttttagaccagtgtttgcagtgtaatatccacctagtacttgttagaaatatggagtgttgggtcccatctcaaacctaccaaatcaaaacctgtattttaataagatcatcagatatttgtgaggacattagcatttgagaatcttgggattagatctcagtaagccataatgtgaccgactgtctgctaattaaaccacactcatactggatattcagcaaagggcctcctcatactcatgtaggtttctgtattctcgatgagacttgacctcatctttcccaactcttcattttcactaaagagcccagcaatatcttcagtgtcttctcccgacacaggcaacttcttaccacaaatgcaaggttctactacaatggtgagaatttttagacaccagaaagaacaggggcaggaaagggttttttgtttgtttgtctgtttgcttttgagatggagtctctctctgtcgcccaggctggagtgcagtgatgcgatctctgctcactgcaacctccgtctcccaggttcacgccattctcctgcctcagcctcccgagtagctgggactacaggcgtccaccaccatgcccggctaattttttgtatttttagtacagacttgggctttcactgtgttagccagaatggtctcgatctcctgacctcgtgatccacctgcctcgacctcccaatgtgctgggattgcaggtgtgagccaccgcgcccagccaggaaagggtttttaatttgctctctaaaccatgtgatgtaggcagcaattcaccctatccacatgtgaggaatgtgttgtttatatccactttccttatagaggaaataaattggtcataactcatgggcaattctcttatattgtagaccagtcttaacagtacttttcagaatcatttctctgcacagactttaatgaagactagcctgcgtttctccatgttgattctgaaatgctcaatagaattcttctctaggttcttagcccaaacatacttttgatgtacagaagactactaactatttctactttatgaacatgacaagtaattatttattaaagtagtgaaaataattctgtcaagaacaattcattctcactttgcccaagctgaatgaatatagataagtctatggcggtcccctgcatccttacacctgaatacttcctgaaaatattttctctcttcttcgttagggaaaaaaatattcaatggacactttttaaaaatggtaaagccgattttattcagagggagactgttttgataggtgtagggctcattggaatgggcctttgcaatggggggagagatttggctcaactctaaatataacaagaaaaagtgggaatttatagccaaagattaagatggaggccagtacatagaaaattactgaaagaaaacataagggtaaagaggaagttctggctaaaccaaccacacaggatccttcctgaagacaggctaggatgttcagacaccaccttggggagggtgaaggataaagaatttgatcagaaatcaagggtggtgagatacatgttaaggatgaataaactggccttttaggattcttgctaaagttagacaatgcagaggcaaccacagagtccaagagttaaggcctagttgaaaaagagttgagagaagcttgagtaatgtttgaacgaggagataatctctgttatttctccctctccattgtcatagtctgagttgtaatatagactattacaatagtctcctcattggtcactcagactctggttatagtctttcttcactcatcacactgtcgaaaatatacatctaactatgtcatactctattcagaattattcaatgtctctcacattgtccccacaatgatacacaggctcctccttaggaagccatgcaagggtttgcttggtgaggtcattgccttcttgctcagtctcatagtcccttcctagtctttctccagaaataagttactttataagctctactatgccttgattcttttgtctaggatattctcaaactttcctgcctttaaatactactcattcattaagtttcaattcaaacattgcttctgtgaagttattcttagtgtactccagaaaagttaaattatcttcctacatttctgttggactttacatatccctttactatagcatatatttttgtaactgtcaatgaactagactttcaatattctgagggcaacaaaaaatgttttccccttaattccaattttctggcaaaagggagaatataaaagttcaataaatattacagattgactgaataaaatgcatttaggtaataattcatttggatgaagataatagattcttagagattgggaaatgggaattgaaataccaaatttctatctacaaatatgtattcaacaagtatatacagtggcacatagagaactctacacttgatgctggataggacatataaattcattcaacacgtacttatttagcgtttacttcacatcagcactattctgggtatttcagaaacattgctgaaagatataatttctatcctaaatgactgcatggaattgaactcaagacttcgtttgtcataatctggccaactctctcttaattcaaattatctgaattcaaattaagaatataagagaggactctttcaattcatttaccttttagcagcatagtataatgcttctcaaacttcagtgtgcatatggatgcagattctgatttagaggccctcaagtgatgcccatgctactggtctataagccacaattttattaccaagggtttaaggttcaataacaaagccgacccttcctaggaatgaacctcccttacattaccaaagctccagagtgtacttattaagtccctctgatccatgggtcagggtggggtaaacatggagtaaagctaaatatgtggggtgctatgccaggaaaatctagagacaatactttctaagaaatttgtgtggtttatctgcctctaaatggaggcaaggaaataaagaagaagaggtccttggatgatattggaagttgtttcaaaaagttgcagtagcaactctcaggaagtaaaagctggccacaacctggcctaagtgatggagaaacgaggatctctagtgaaaaacttactttgaatagatatatccttgcccagcttctgtaggacaaagctgtatgtagattcctttgcatttttcacaatacttaggatagtgttccacatagaggctacatatatgtggaattaatgaatgaatgaattgtctttattttacaagataattggaagctttcaggatataagtgaattgtctgacctattaattatggaagaatgtttacacttttgttgaaatgctattgttaagcattgagttacaccggcttgtgtagtataaaaagatttaagaaaagtacacatcaaataagctgccttttcactgcctgggaaagctgtcatataagcattgtggttttcatgttctgtggtggttgtctgccacagtccagcagaagtttaacagtaaataatgttaagcatgtgaactggtcgggggggtggcatttgcatttatatctcatatggtttgttgcccaagcagaattgagtggctacatttttctattttttgatgtcttattttgttaatcattccaaacacatttgttccgttccataaaaatgagcagcttaccttctacctttgtgaaattactgttaatcattctctaatgtctgcattatcccatttaaaccgttcccctgtggttttacaattccttctgctcactaatccaacaggaggaatgatgtgcaaacaagcaaatatagagaaacaaataggttttcttgtgaatcgtccttataagcctcatcagcgacattagagtttctcaaaatgttatttaagaatcaaataaatctatagataaagcattcaagccagtgggcttgaaattaatccaggtgatgatataagctcaatataaaatagaggatgcttttatatccatgaatcatccccgcttcctgcacctagccttaatcttgactgatagaaccacattcttaaaacttgactatagtgaaataatagtcagcaacatgtgaggcatataatggaaagggaaaatgcatataatttcctaagacttacatccccattgctagccaaacttacatcaaatgataaaggcctgggtatctccatgtgtattagtctgttcactgctaataaagacatacccaagactgggtaagttataaaggaaagggctttcctccacatggctgaggaggcctcacagtcatgtcagaaatcagaggaaaagcaagacacatcatacatggcagcaggcaagagagagcttgttcaggggaactcccatttataaaccatcagatctcatgagacttattcactaccatgagaatggtatggggtaatccggtaatccacccctatgattcaattgtctctacctggccccatccttgacacgtggggattattaaaattcaaggtgagatttgggtggggacagagccaaaccatatcactatgtaattgttacatgagcaagcccatcaataaatattggcacatatctgcattgaagataaaaacatccaatcagctggctatttctgaatatttgatgttacacaagtaaaatattcagatattcaactgcagtttatcattctcatgtatgttccatactttgtatatagcacttggatatgcattttggaccaatattttatttggctttctggaattatataactgtaatgttgtatatccatggtcatgtcacattaatttttatgagtaaatactacaatttatctgattggtaaattagagataagcatgatcagggttatattggccccatttagatgctaaaccagtattatctgataacaattcactgaaccagtattatttgataacaatacaagccaatactatctgataacaattctgcttcctttgccagcttctaagatctggggctggtgaaggaagcagaatgggaacactgagtgtacatctcatttgatacatttctttctatccatcctaaggatatcaagcacaataaaaaagaatgcaaagataatgaaacaagaagctgactagctgcccaaagtaacaatatcaagttctgaaataaaacctttctctgctccatcagttaggatagaagcaactttccctcttcaattatgccacaatcctaatttctcaattttggttctacttgtctagggtccttgcaatgatgtcactctatcattaagttcaattgtgactgagtgggaagggagaatatttcccagtcaccttctccttgccttgtgggaagtcacagaaggatgtcaaatattatcacatggattatgtcatgcttctgtcagttaggcagcccacttgactaccatcataggaaaagttgatcgaaatatacattaaaccatggttaatttttgccttcactgtatatgcaataccgatacaaaatacacatgtaggctgaagactccttcatcttcaatggtgtccttaattgtgatgttctttttttaacctacagcaccattgatacaaacccttatactcctgctcttatttctactgaaatattttatagacaacccttttctatgatttatacctcattataaaatcaaatttctaggctgtcagaaagaaattgagtgcagcaaagtaggaactagttctgtgacatactgagatggcatatcagcttggaggcataagtcccaaagcagaaagtgggaattatagataccacctacattcattcataaataggagaagaaataatgatggtacagaacagtgattttcaagtcataatgcaagagattcttaatagtattttaaattttaaaaaatggatttatgattgaagctatcaaaatttaccagagctcatttccctcttgcactataaattattataacatttatcttattgaaaaacacagatattaattagttataaaatgaaatccagtgactcaactctcttcagaaggagggtctaccagtgtccttaaagctctactactaatcatgataacactagttatttttgctgtttgaactttgacctgttcttttgaccagttcaaggagatatgtgagcacagcatgtaacactgatttgtacctaattataaatcaaagtttcttaaatcatttacataaatttgtataatgtggaaagaactaaaagttagacttatgagcttcgcaaatcatttcttctaccttaactctttattaatgtgtctcttttttaaaaaagaatcaacggattcttctttgactcaacactctccacttctcacactctaaccctcagcgtctaacaaactgctttcaagtgttcaggaaatgtatgtaatgagtgtatgtgtgagtgcattggtgtatatgcgtgtttccttctcattgatgagaaagggtatagaatgctcatcactagagagcttcatgaagcgaataaaacccctgtttcctatgatgttattattcccctcaggagcttaggccagatgatctcttagagtcgttttttgatctataactcagtgatcagtgagccagctttaggtcatcctgtactctttagtacacaacactattgctcaagagtactatatggtgcccctgggccctgaaaaacttaatgtacaactctaagagtctaaattactgccagggagtgatgtaggtagtgaaaataaattccattaatatcttgctaagtggttaatcagcaagtcaaataataataataaagtgttagatctgttttctcattctgtcctttatggacagaaagaatacctgttaggtgtgttcctcttaaacagcctttaataaattttaaagtagtgatcaagacttcccttgggtttcttatctctaaactaaataaaccctattcctttcatctttacaagtaagatccgttttcatccctttaatcattttcattgttctcgccaatgttctcttcaatttattcacatctttataaatgtgatgaacaataatatttatctgaagaagtactagaatataatttggatgttccttcttgactattttttgtttgtttgtttttgcttttttttttttttttttgaaacggagtctctctctgtcacccaggctgatctggtctcactgcaagctccgcctcccaggttcacgccattctactgcctcagcctcccgagtagctgggactacaggtgcccaccaccacgcctggctaattttttgtattttttagtagagacggggtttcaccgtgttagccaggatagtcttgatctcctgacctcgtgatcctcctgcctctgcctcccaaagtgctgggattacaggcgtgagccactttgcctggcccttgactgtatttttaaatgacaccttaatcttaataaagagattaatgccaaaatcataaatggaaaatctagagattttataatgactgattgcaattatgggcaaccattctagccagttaagagagtattcgaacactctctggtttgcacatcaagtttacaaaccaaggtctgtttaaagataacagttttggtaacagagtattttgctaactacaggaaggtagggaagttcaagcagcaatattagataatctactagaataaaggattataaaaacatacatacaagttttccaattcagagatcaactatttgtgcttaaccattctaggcttctcccttagtaattggatctctctctgaaagaatcctgaatctaacaaaaatgcacaaaatctaatgtattcttctctgttaatatggtaccacagcttggtacttcttactttcatagttttattaagtttatcaataatgtggccaattggaaatgaccactaatgcagttaaaataagacaaaacaaatacaagagtcaaatggaggagagtcccatgactcacattctcattcagttgccggttgttttttgttctctcttgtactagtattccctgaaaggcaggaaatactagtcctctgaacatatccagcctccctaaggaaagtgacaaaagaccactacagaactatgtgctctataaaccaatgcctaggatcagaatgtcagaacaaattcatccaaacttgtttatcttttcatttgtgagactcaggtatactcaaagttccacaccacttattacaatccctcttcttccgaagggtagagttaattttaaagttggatgcatcatttagcactgttatttccaaagacagtttaccagaatatggccacactgaagtctgctgttggcaagaagagaggaaaggaaagccagtcaataaagaccaaaaacagttgttcccatccttctacccagttcatgtctctttactactgtgatacattctaatctctttggcaacataattatgttgtattaatgcatagtaatctcaatcacttcaaaaagttctctagctcttgaacttatcaccttcattatcaatgcaagaaagaacttgaggcaaaagcagtcaacgagagaaagaaagtcactggcttacttccataatgctgagcatgatgccataagttttatttgcataaggacatttgattcttcttagaagaatggcaaagaaaactttgcaggacaaatcattgaatctccaccaagaggagagattagaaacagtctgaatactatgaggaaaataacccagatggtaggtaaaaatcaaaggaactgacatatatcctggggcaacagctgtggtcagatcagacagatactatttatatgtcactgaggaaagacacagacatatttatgtacttaagcccaaaggaatgtaaagctacccttgaccttaatgaaaagagctgtaattcttttggtgttccatagtaaaattagtggtcaacacaagttttgttggcaatgttacataaccacacttatgtagatcataataactgttgaaagatgagcattcagaaataacttattatgtacaagagatatgcattaagattaacagctaaattattcagaaaccatggaggccggaaggcactgggatgacatattcaaacttctgaaagtaaaagagtgtcagtcaagaagtctgtatccagcaaacctacttttcaaatataagtaagaaattaagactatcccagataaacaaaacctgagataatttattactattccacaagaaatactaaagagagtccctcaggctgaaataaaaggacactagatagtaatgtgaattcacatgaagcaataaaaagccctggttaaggtaactatataggtaaatatcaaagagagtatgtatttggtatgtttaaattttttcttctcctatttaatttaaaagataactatgcaaagcaataattataaaactcagttgatgggtttataatgtataaagatataacttcatgataatcccagaaaggaaagtgagggaacagagccaaataagagcagttttttatactattgaaattaaaaagacactaatctttttcacttcccctcaagatgacactattcttaactagattattgtaaattaagtgttctttgtaatcttcaggaaatcactaagaaagtgaatcaaaaaaataatgaaataaatgacaggagaattaaaatggtacactagaaaatatctacttaacacaaaagaatgcagtaatataggcataaaggagcaagaagacatagaaaaccactaccaaaacatcagacataaatcctaccatattagtaattacattaaaggtaaatggaataaatagtgcaataaaaagttagagattgggagatggaccaaaaaaagagatccacctatctgctgtctacaaagacactctttagattcaaagacacaaataggttgaaaataaaagggcataccatgtaaacagtaactagaagaaagctggagtggctatactaatatcagacaaagcagattttatttgaagccattcaaggtaaagaagaagcatgaaatataattcctaagctattgatcacttcattctacagtagtggtttagagaccaaggagcatctgccaccaattcctatctcttgattattgtcccttcttttgctgtcaccttggaaacagagacttcataaacaggtaaaattgattatacattctgtctaaaatgtacttgtgtttattttatctttaaataaaatttgattatagtttagaatataatgatcttactaaacaatcacttatgtacacaaaataatacaaaacaaatgtaagctcaattaagtgtgacacactcatgtaaccaacactcagattaagaaatggaacattatcagcattccaggacctacactgttatcctctctttcagtcattttttccctcaaaggataaccactacccagacttctaatgcaattggtaacttttgtctgtttctagatattacataatgtaattgtatagtacgtgcttctttgtgtctggcttctttcatttgattccatttttatacagtacaaccatattgagactgtagttctagtttgctcatcctttttgctgtatacaattccattatgtgattataccataatgtatttattagttctacaatggagagacatttggtggtttccagattgaggctattattagtaatcctgctatgaatatttttgtagatatcttttggtggatatatgcacacatttttcttgaatatctgactaggattaaaactgtcaggtcatacgatatacaaatgttcggctttaattactactgtcaaatattccccaacatagttgcactgatagacaccccactagcaatatatgacagttagttgctctatttgctcactgatatttcattgtctgtttatcattttagccattcttatgggcatgtagtagtatcaaattatgatttttcgtttgcatttctctaatgactgacaaagttggacactgtatcatatgtttactaatcatttcgagatcttcttttctggatgctcatttttacatttggattttctgccttttacttattgatttgcaaatatttttcccagtctgtaggttgacttttgttttccaaatggtcttcttcggtgaacagatattattaaaatggtaacagttatcattatttttcttttgtagttattgattctggtctttctttaagaaatatttgcttaatcaaggatctttaatatattcttctatacttcttctaaaagacttattgttttgccttttacacaagtcagcatttcatctagaatttttttatgtgtaatgagtgacatgtgtagagacctatatttagataaatatccaattgactaagcaccagttataaaatggtcatcttttcccccttgacttctagtaacacttttgttgtttaatttctttctcctcttttatttggccaactctagttctagagatgttatcttgtaagcatggatgcacagaaagccaggagtctagcgcaagaaaaaaaaatcatgtaattatttctactgtttctcagcgctttatagtctagccatgcttaataaatgtttttcttttatcatgtttcctcttttacctttgccaaataacatgttactggtggaataagtaatattgttcatagaatttttaaaaattgtagcatacagaaagtaagaataacccacaatttcaccacccaaatgaaaactactaaaaagttttcatgagatttcttctcagtccttttcctaataagcctattcttaattcaaaatctctaagtacctaaaagcagagggtttgtaaggacaacctaaaagatgacttctggcttatcaaaatatgtgttcaaggacatttaaaaatgcagaagaaaaacatctgatatgaacgagatggtgcagattcttctttctctgtttctccccaactaagtacaattacaaaccctgacaattacatacagcaaccatagaatgacacagaagaatgataaaagaaaggtgaactggctagaggccccaggaatgaaggaaaaacacaacagccgggatcttctgaacaccacatccttcattccacttgcagaaggagaacccaggcccgacatcttctgacctaaacctgtggcggaatgttgcccaagcaagtagattccttcccccattccctgcagattaaataagagtctccaacaataagcagccttggaaattgttctctgcttccaagatcaagactctccttcttccctctccctgaccccctattagagacactgggcgatcatgtcaggcagaaattaaatgggtaccctaccaacaacagaaatcctatgaaactgtatcaaacccatgaccgggggtctccctctccttgcttaaagactctaggtggcctaacctggtggccagcacaaagagaatttcaggaggcccactagcaccaagtaaaccaaagagaccaaaattgactattaaggctcagaaagctaagttgggagagtaactgtagcccacaaaatataggctagggcctatcacttatagaggatgactgcttaatatagcataaaacttaaataggatccagagtattctaacataaccacaaaaatacgcaggatataatttaaaatcacctgcaatactaagcaatagcaacaggaaaatcatgacttgaatgagaaatgacagcagttgacaacattgagaaaagtaggatattggaattaactaacaataattttctcatagtcatcataaaggttattcagcaaacaattatgaatacccttgaagcaaatgaaaaaaacagaatatctaactaaaaatcaaaagactagaaggaaattatagaactaaaactacaataactgaaatagaaatttcactggcagtgctcagtagcagaataagcatgacagaggaaagaataagtaaatttgaagatagaacaacaaattactcaatctgaacaacagagagaaaactaacatatacacacttatgtatacacaaggcttcagacatctatgggacaataataaaagatccaggattcatgtcatcagcacctcataagaggagaagaaagggagtggaatgaaaaaaatatgttaataaataatagctaaaaatttttaaaattttgtgtaaaaatctatctacagtttcaagaagctaagaaaacctcaagtagaataaactcaaagcactccacataagacacatataattgaagttctgaaaactacaaacaaagaaaaaatcttgaaagcagctagagagaaacagcacattacctatagtggaacaacaattagaatgacagctttcttatctgaaaccatggagaccagggagaagtctgatatttttgaagtgcctaaaggaaagaactgtcaaccccaaatatatccttcaagaatgaatggggaaatacatacattctcagaaaaaggcaatctaagaaaagttatcatcaacagacttatccttaaagaatggctaaaggaagttctccaaacagaagggaaatgataacaaagtaagatttggaactccagaaaggaaggacaaaagaatgcaatgggtaaaaataagagtaagtagaccagcctcctcatgagttttaaaaatcatatttgatgattgaagcaaaaattcaattaataaagagaaaatattcaagttagttgtatttccagcgtgggaggctaaagagacctaagtggaaataaggtttctacacttcgctggaagtagtaacatgtcaataccagtggactgggttaagttttatacgcagattataatatttagagcaaccactaagaaaactatacattggctgaatgcagtggctcacacctgtaatcccagcactttgggaggccaaggtgggaggactgcttgagctcaaaagttcgtgacaagcctcagcaacatggtgataccccatctctccaaaaaatacaaaaattagatgggagaggtggtgtgcacctttagtcccagctactcaggaagctgaggtgggaggatggcttgagcctgggaggcagaggtttcagtgagttgtgatcatgccactgcactctagcctgggcaatagagccagactatgagaaactttaaggaaaaacaaaaaagaagaaagaaagaaagaaaaactatacaaagaaatattgtattagtcagctgaggatgccataacaaaatatcatagactaggtggcttaaataacatgaatttatttcttacagttctggaaactgggaagtccaagatcaaggtgccagcaaggtagattccattctgagctttcactcttctcttggtttgtaggcagtgattgtcttgctgtgtattaatgtgacctcttatttgttcaagagctgagaggcagacagctttctctcttccccttgtataagggcactaatcccatcatgagcttattgtcacctttatgaccttctctaaatctaataacttccccaaagtcccatctccaaataccatcacattgcaggccagagcttcaatatataaattggagaggactcaattcaatccatagcaaatctactcaaaaacttagatattacaaattgaaatcctcccaaaatggcaaactcactcacaggaaggcaagaaaagggagacacagggatgagaaacagatggactagaaaacaaacaaacaaacaaacaaacagtatggcagacttaagccctatcatattacctataatgtaaataatttaaatatacaatatagtaacagaggttggcagaatgaataaaatatatgattcaactagatgctatctacaagaaactcagttcaaaaacaacatatgtaggttgaaagtaaaagaatagaaagagatgcaccatgcaggtgtaaattttcaagagctcagaaggaactctttgatcccttacacactcatgatgctcagatactttaatacacagtgagtctcagtcttcgtgaaattgataattactgtttgtcagactttcttagctcttcctgaaccagattactcaaatattaatggaagatctttacaatatattttttaaagagtaatagctagacaatcatctagataagcacactgagagagggagattgccgattggaagagcagccaaagctaaagaaaacatgtaggcaagatcagttatttgaatgagggccctgcttcgtattttgcatttagaagaaaaaaaatcatacattacaaaaatagcaatggagaaaggataaatggaaagataattttttatcttcagttctgtggtgtggcttgtggttctgctctttttaacatctgtcagcctccatcaatatatgcctgcataagaattcaggcaattatcatttgaaaggttgcaaaattgtccacacagtgaaattcaccttccgagttgtagtttgacagctacgttgataagctaaatccaaataaaattagccttcagttagatgctctcacgttactgtaataaacttcctgggacatacagtgtcctttggaggaccaggagcctcgcccaaacagacttgaacaactgttgaccagacttgacagcatgcagtccacagaagtgcctgaagccccgggggtagggtggtgggaacaaaaaacaaaaccgtttttatcttttgcactctccctttctcctctaggccattgttgaaaagggtagcttttctttttttttaacataaaaagaaatatactatactttccatattttgggcaattttaggatgttttgtggaatctagaatcaaccagatttaccctgaatgtactggaaaatcttttgattgctcccaacttacttgtaaacctctatgtaaaagtgccataaatacaaacctacagatggtcctgaactagaccctctataatatgataacaggagccacaagagagctcagtgtgacgtagtgtggaaataagatatggccctccctcatatatcccttccacgatcttgcatgatccatcatcattatcatgagaaatactaatttagatgtttaatctgactgcatccttttttctcttagccacattctctccgtagccagatgcagtaaaaggacattcactatgaacagagtgataagtaaattgacttcatatttctaacactagattatacaatgaccttgcagtggtttggggtgggggtagcaaaggatgggcttggataatctttctcagcattattaatactcttcttttaattcagttcaattctattcaattcaacaaatatttattagacacttggcataacaggcattccacaatgccgataaaccaggggaagactataagtagctgtcaatcttataaaggaatatattaaatgcaataatgacaatatcacaagataaatcccattctcctcccttctttccttcttttctcttcctttcctactttctttcttatttttgttcttttcttttgttcctgagggatcatattcttcaaagtgacattaacaaattcaaaccaaggttgacttcaacctgtcatttctatagcacatttcatttaccaatctaagacatcaacaccctcttacagtagatactataaacgcagtcacttcctttgcagagacctagagagccaagaggactttctcaaggtcacccttcacttttctgatgcacacgaaacaagcactagcacctttgctctttggttaaaagcatctctcatactgcagttttctgtcgccaactataatgcactactggtgattttcatctacctctatatgaacacaagacagagtgcgcctcttccctgggttatttccatagctactgtatttattatattaatgtttatcacttggatgtcatttaatgaatgtcggcaggggggagggagaagatagaatgttcagggaaagaagctgtgctattaattcaaatggatagtcaagacaagcatgtacattcacattgccatatgggggctgttttagggcactgaagcagttaattttgttttaaagacacaagcttagataaaatagatctttttgacttggttgagaattgaaattataaagcatgcaaggcttcagattaaaatgctatattattctctcctccccaccttatctgaggagtgtaatgcccttacaatagcccacttcttgaactctttccaatttcagatatttcctatctcttttaatacctcattgcttttgcatcaattacggcctgacctaaagctgcactggaagtggaagtgatatatagtggaatccattgaaatgaatttctgatgaaagaataaaactgttaaaagaatacatttactgcacacaaatttatgcaaatcccatatatgctgtgaaatcccctgaaatgaaaaactgatgaaagattaaaatgttaaatgaattaaaatccaccatcccagtgaaatataatgatgatttgacctactaaatgaatggcctaaatgaagatataaatttgaagtgctccaacgtatgtcaattttaaatgtgcagtaagccagcataacacaaaaatatggctctcactattaaaggaacacattttttctggaaccagccattatttagaaacatctgtgttggtgctttacatgatgagaaaggcaaaatattctgttgctcatacaaggtaacatcatgtattaacctttccctctttcctaatcctttatctcttgatctcttcagattatatttgtatatactgccttagggatgggtaagaattgggatactcctatggcaatttctacctttcagcaggggtccttcctaaactcagtttatatcatgcctgaagaatatagaaaaataatattaggatatacacttttagtgaaacataggaagttagccaagcaatttttattaacaattactaccctgcacatctaattcccaatttaacgttaaaaaataaaaactatgttgaaaagctcctagcagttaaaataagtttgcaaactagtttattgcccaggtgaattgtacgttctaactcagtttagggcacaggtaatgtgtgttttgttgataataaatttaagtttcagtcactgaaaaatcatattctctaattaggcacaactagaagcctttcatcattggcaggaaaaataaaaatgcaattgcactatggaaaactgcgcccagtgattctctgacctctagtcagattatggtattatagtcatttgcaactggaagctatggccaggatagaggtcattatccttattggcacctctggcagtgtccaaattttagagcatatggccaaatgcacatggtcattaattcgcatggatccactgaccaacatgaaatgatatataacttgccttcatggaccaaagcaggaggagcttctatgctaatgaagtctggccaatcctgaacctatttctctctctctctcttttttttttaatatatattattttattttactttaagttctgggatggatgtgcagaacgtgcaggtttgttacataggtacacatgtgccatggtggtttgctgcacctatcaacccgtcatctaggttttaagccctgcatgcattaggtatttgtccaaatactatccctccccttgcctcctacccctcaacaggccctagtgtgtgatgtttccctctctgtgtccacatgttctcattgtacaactcccacttatgagtgagaacatgtggtgtttggttttcggttcttgtgatagtttgctgagaatgacggtttccagcttcatccgtgtccatgcaaaggacatgaactcattctttttttatggctgcatagtattccacggtgtatatgtgccacattttctttatccagtctatcattgatgggcatttgggttggttccaagtctttgctattgtaaatagtgctgcaataaaaatatgtgtgcatgtgtctttatagtagaatgatttataatcctttgggcatatacccagtaatgggattgctgggtcaaatggtatttctgtcctaaaccgatttctaaggagaaataaagttgctcctaaacttcagcttcttaaatttttatcaactctagatatattttggtagaaaactgcccaagctttaccggaattcctaaagaggaaggattcctagggtacagctataagtggcccaggatagtctgcaataataattggcatagcattgaaataaatatcttgggtgctgcaacaccctttaaactacactcgtctaaaaggccacgtgttttgcctttaggggataactttgttgtgttgatcacctgcaggagtttccataccagtgtctaaatgcttcaagaggaagcacttagtcttaggtatctttgcaattctaaagaaacccacagcactcattaagtgtttgatgaattaaactgaaacagtagagagcaattttactccggctaaagttacatgtaaacaagacttgaggttttagcaccccatggggatgccatagttggctccccttacatttctttatgtattccagaatacttttggagtgcctcttctgaagtgttaggtactaggaatgggtttcctgtccttaggaggcttactatctgtcagagatgctcaggtgccttggctaattgttatctggttattatctatcaaggaacaattactaccaaggcctgtaggaggcatagatttacgtagaaaacaaggtgtagtttcagtgtgaggtagaactgatgggtaaagaagcagttaaaattgaatacgaggagttacctaaaggggtaagcagggaatgggaaggaagaagttatatctaaactggaacctgaggccaggtgcggtggctcatgcctgtaatctcagcactttgggaggctgaggcaggcaggtcacttgaaatcaggagtttcagaccagcctggtcaaccccgtctctactaaaaatacaaaaattagctgggcatggtggtgcacacctgtaatcccagctactctggaggctgaggcaggagaattgcttcaatctcagaggcagagattgcagtgaaacgtgattaaatacttactggcattactcttatccctaatatcaccttaaaacttaaagactgtcaatatctgttagagtcagagtgaaaaagaattctgacatcactgagttaaacatagtggaaattaagttgctgaaaataaaaaaatgtatattctttaaatgataactaaaaatatgcatacatacccttattagtttttagggatattcgttgaaaatgaggatttatcttcactcaattttaacataaaatctaaagattacttagaattataaaacataatttaaataaaataaaaatatatataaaataaacattaaaatcaatataaaaggcaactaggaaagtttaacaatttctaacatttcaaagacttcttttttcccttattgttttttccttattgtttgtcaatttctaatttaaatacattaagaattagggccaggcatgctgactcatgcctgtaatcccagcactttgggaggccgtcacggccagatcacgaggtctagagatcgagaccaccccggacaacatggttaaaccccgtctctactgaaaatataaaaaattagctgggcgtgatggcacacacctgtagtcccagctactcgagaggctgaggcaggaaaatcacttgaacctgggaggtggaggttgcaatgagctgagattgtgtcactgcactccagcctgggccacaagagagagactctgtctcaaaaaaaaaaaaaaaaaaaaaattagaaaatcacacatatctcaaattctacattacagatcaaactgtctttcaataattctttggtttatctttatcttagccaataattcctcttttatctattgttattaaattccatttgattttcttatcttttgtatccaatagaattagtttctactgtatataatatactaacaaaaagtagcacagcttaaacaaaatagaagtctatttccctgcaatgtgaaaaaatccgcatgtagctagtcgttattttcttagagagggtacaaaaaattatcatagttcctgatgacttctgtctcacagctctgtcaattttatatttgtttttcaagatagcttccaggactctgacatatgtgaatattctgttgactgtatagctacaaaatagaaagtttcctaagagttttaaaaatatagtaatctgtacgttcctggtgctgtatgccctaaagtcaaaaagacctttctttttatttacttatttttatttttttatttttgcgggtacataatatgtgtatatatttatggggcacatgatatattttggtacaggcatgaaaaacagctttcttcaaaacaatttataacctatttctatatgcatatcattgctaatattatattgctcttcttagattgctttccgggtaatgcaggataaagcaaagagactgattggtcttttgcttatgacagtttgattttctcatggtattttgattatagcgtctgtaacatacctaagaactgggattctctgtgcgggataaagaaaatatacagttcagatggactaggttacgtatacactgataattgtgaatttgaattagaattaaaagtacaaattcttaatgtgttttgtgtttaaaatatatattataatatataatacatatatattttatatgtatacatatatgaatttttaatacatatatgtatttttaatacatatattttaatacatatattaaatccatatttaatacatatattttaatacatatatttttaatacatatatacttaataactctgaagctgcctagaaaaaaatggcccacctggtagcaataactacctctatcgtgccaggcatggtggctcatgactgtaatctcagcactttgggaggctgaggcaggaggatcacttgagctccggtgttcgagatcagcctgggcaacatagcaagatcccatctctacaaaaaattaaaaaataattaaaaacacctctatcatggtctacagataccatttcctacaggctgattccagacctggggcagaaaacgtacaagatgagcctggatactgtaccataccatagaacaagaacactattatatatgactagggtctcatcaagaggatttaggagctgacttaaaaggactcccactggccaaagattgttatgtaaaagaataaaaacggcaaatgattcaaacatattaaatatgtttgttcatgagttcataatgatgcaaaaatacgtacatacacatgcacagagagagagaaccagagggagggaggacagaaaacatctattgtgtcatcctcaccagattctagggaaataatttattattttgggaaccagtaaataaagaaaagaaacaaggcatttgtttgccttgtctacatcaactataccactggataatctaataaaagatcaggagatgtttttctttatacagatagtctaactaacaaaaaacaaatgaatgatagattagaaattcacaatttacaaaaaaatgcatttatgacttttatgagactattgagaatttgaacactggatatttgattaagaaattattaactttaggtgagatactaatattttggctatattaagggagtcattattaaaggatcacaataaatatttatggatgagataatatggtctttgcaattcacttcaggataataggagggagaaaatggaagaaagtatagaggggcaaaattggccttagcctcatatttcttggagctgagtgatggaacttcattatattaggttgatgtgaaagtaattgtggtttttgccattacagtagacaaaaaccacaattacctttgcaccaacacaatactatgctttctccttttgtgtgtgattaaaagtctctatgttaaaggaaaatgttaagatagggtataatcatgacttttataaaactattaaatgaacctaggtcaaagattgtttgtggtttattaatttataaggaaaccaataagatgttactactaatttttaaggagattatatagtttataggagacgtcaaagaaataaatctttgtaagcattaagtgtgcagaaatgaatttacaaaactcacttattccatgaagcgtgtggttgtgggggtggtaacaggaaaggaattgtatttcctctggacaaaatatgtttacatgtctatagtcaggaatcctttgttggtatcacttatttgcaatttacagagtggttaaaaagcttaaaggcaatgaaagttgtagaaacaccatagaatcagatgacctgaaagaatatgtttaggcagcacttacttttcattctttctcacttttcagtgatcttttcagtctttctcactttttcctatcgtctctgtgctacgcagaataatgcccactccccacaacccccagagcctgtgaatatgttaatttacatggcaaatgagactatgccgttgtgattaaattgaggatctggaggttgggagattatcctggattatctggataggcccaatgtaatcacaggaatccttatattgagagaaaacacaggaaagtcaaagtaaaagaaggacatgtgacaatggaaggagagattgaatttatgcaattgctgactttgaaaatggaggaggcaggccttgagtgcaggaaggcaggtagcttctagaaactgcaaaagtcaaggaaaccaattcttctctagggcttccagaagaatgcagctctgcattctgcaaaatgatctcagtgagacccattgatttctgacctcggaactgcacgataatacattcatgttgttttgagccattaagtttgtagtaattttttacagcagcataagaaattaatacagtctccaaccacgctgagctttaagatcatatttatctcaaacaaggagtattcttaatcaccaaaatacttggtcccacccacgatttttagcctgattgattgctaataagatgtagcaagagtgttgacaaatctctttgagactgttttgagaatctagagctatgcaatgtggaacaaccagtgagaacacaaacttaacttctgtttgtaagtttccgtaagaaataatttctttctcagcatttcctgcctcatgcaagtaccaacatttatctcattatatctggattatttaacacatgactaatttctggatttctctgtatcaactgttgtatttgtgcatttagaaacatctcgtattcgttctcctaagactagaaactcaagcctaacaaatacctatatcacatttcatctgtataatttacaaatctgacagaattcctgtcttctaggggtcgctcaaattttttaaagcttttactctacagagaagtgaccgtcttgccatctgtaagaccaaaccctgtaagccaatatttctgggtgggctttgtaggcattagctccacacataaaatcaacattagttccttaaaagtgacttatcctatctaattacatttgtattattttcaaagatgatattcaccttggttgcatagttgatttgtccaaacataacctggtaaaacagagaacagattctactgaatctattcacataattatgttactatgaaaagtaatgatgcttagtaaaagctttgaaatacaaaagtcattataaatcagctaccatttacaaatttttttttcagtttacgaaagcagtttattaaacttctgtgggttgttaatggcttaagaaaagataggacttcctcatatattcaaaaaatagaaaaacaaaacaacactatttcaaacaaacaaattattacaataaaaatttcctcattagctcatttagatatatttaattaattcttgtgctgctgaatcttgtgttaccagtttcacaaagctgtctagttttcaacctaaaataatacgagaaacccagccccatccactggtagaatctgagagcaaattatctctgtaaaatctcagagagtaactattttagaatttgcaggccaggccaggagcaatggctcacatctgtaataatggtgctttgggaggctgaagtgggagagcaccttgagcccaggagttcaagactagcctggacaacaaagcaagatttagtctctacaaaaaattaaaaaattagctgagcatgatggcatgtgcctacaatcctggctactcagaaggctgaggcaggaggatctcttgagaccaggagttcaaggctgcagtgagctgtgactgcactgcagcatgggcaagagaaaaagaaaaaataataatttgcaggccagattctctctgtcacaactactgagctctgccattttagcaaaagaaaagtcacaaaagacaatacaaatgtaagtggacatgttgtgcttcaataaaacatttacaaaaacaggcagtgtctttccggggaagcaggccatcctttgctgatccctgctctaatcaatatcagatcagctttgataagtcaacaggttgcagtacaagccttttcctgaaggctccgaagctctcgttcttggctgaactcacaaaatcttccttgtagcttatagcagagactccatgggatcatcagagtaaaacaaatactatctgaagatagaagagaattaatggctgtagttaatttattactaataattttcaattgtgaacattttatgagatttttctatatagtatagaacaactgtagagttgaataatgcagttgacaggagtacatgattatttcagtgacatgaaaatcaaagataataaaaccattccaaaaaaaagtttctgagaaaaatgatcaaatctattttcagaaacatcactgaatgctatatctgatttacaaaattggatgaatggctttaatgagaaaaaatcttggaatatagcatataatatacataatatgccaagaatgtcaaataaagagattcagtaagtctagagtggggcctaaacatgtagaaaactccttgggcaatccagtgtgcacctccaatatagaaccactagcctagaagactctagcttttgttgggtgtgggaattgatttcactctacttacaaaccattaagatagctctaagatatgctcttactgtttcttgtgtaccaacagaagacatgagactcctagatcagagacagaggactttattacttacatcacagcaagcaacacaaatgaatatagttgcatttagtttctcttgtacctaagtcccacaggggtgacagagagggtccagatagatgctgtgcatgcatagggtttatgtcacagtctgaagaactctgagtttgaggaaatccatcacttctgtagtaagcagtaagcaagcctaatctctgcctcagatggaagttttatttcatccctcaaagaaacttatgagaacacagccttgggaactggcccaggtaaaggagcaaccagggccttgaaatctcagcaaggagtatgagaagcccatgaacagctatgtctcccaacagattcaaatgaaaaaagtaaggttgtagacaagtgagcatttgaagtaaaacctgaaattataacagataagtatatattgtttttgcttaatgtcgtcacataaagcacaataggactctgataaatattcaaaaatccgacagaactagttcatcataatcttgatcagggtttcaccagagttgaaatatattatgaaaaggaaggtattgacaaatctctaaggacttcacataaagcatacaatttctgaaatatttggattaataacattaacctttacaaactgaacctagagaaaagcgtgtctttccaaatttgacaatttttcccatgcagttgttataatagtagcaaatcaaacaaaactcagtatttctagtgcctctttttatgagcaaaagaacaaatttttgtgattgtttcccaggagccctctgggaaacctcaaagatagtttacatgtaaaagatagtctgaatttttattttattttttctatacttaggacctgaatttgagaaggctaaaatcacaatgtcttcagagatttggaaccaagattgagataagatggtgggtgcctgagaaataataactagttaccaattaaataaaatgacaataaaacaaaaataaacattgaaattagcagggtggtgaaaaccttagttctaggctggccatggtggctcatgcctgtaatgccaggactttgggaggtcgaggcaggcggatcaccttaggtcagaagttcgagaccagcctgaccaacgtggtaaaaccttgtctctactaaaaatacaagaattagttgagcgtggtggcatgctcctgcagtcccagctactcgggaagttgagacaagagaatcacttgatcccgggaggcagaggttgcagtgagctgagatcatgccactgcactccagcctgggtgacagagcaagactccatctcaaaaaacaaaacaaacaaacagaaaaacacagaaaaccttagttctattataagtggggaagctttcttcttttttttcatattacataaattaagaaatttagtcaacaaaaaccacataaaataatgctggtaaaatagagaatctctgctgctatccacatggattacacagaaggtaaaaaagaacctgtcaaattgttggcaaagatcatcagtaacctaaaaaaggaaactcatcaagatttagtatattttgttaaaatttcaacacttttaatagcttgttttacactcaagtattatgaactataagaaaaaaatcacttttctttttttttttttttttttgagacggagtcttgctctgtcacccaggctggagtgcagtggagagatctcggctcactgcaagcttcgcctcccaggttcatgccattctcctgcctcagcctcctgagtagctgggagtacaggcgcccgccaccacacccagctaatttttttgtatttttagtagagacggggtttcaccatgttagccaggatggtcttgatctcctgacctcatgatctgcccgcctcggcctcccagaagtactgggattacagatgtgagccactgcactcggcctaaaaaaatcacttttaaaatttcaatattatttatcttctttcacattctggaataaattggcattttactttaggacagatctcaggaagctcatgagtaaaaacttatttcacaataatactaagatatttatgttagcatgcaatgtattcatcatggctatatttaaataaatccataaatgtttaaaacttgtttaaattctgaatatgataaatattgatatgtatagctcacagaagcaaaagctctctgagttcctcaataggttccaaaagcctgagaattgttaccttaaaacgaaagtattctttttttcttccaaaatacatacacagttcattttgggtcatcatcgctccaagggtagtttctgttactcgtgttaattttaacatttaataaactctcacagagaaaacgagggtagccaagtgtctgtcatacataagtattttagccaattagcaaagctcatggacacacagaatatgtctttcaacagccacacaaatacattttatactttttttttcttttcttttttttttttttttttggagccagggtcttgctctgtcacccaagctggagtgcagtggtaacgtggctcaatcatggctcacggtagcctcgacctcttgggctcaagcaatccttccatctcagcctcctaagtagctaggaccacatgcatgcaccaccaagcacaactaattttttaatttttgtagagatggggtctacctatgttgcccaggctcatctcaaattcctggactcaaatgatcctcctgtcttagcctccaaagttctgggattatagacatgagccacctcacccagtttacactttcttaattagacaaaaatgaatacgtccattaacagggacaaagatcaatccaatttaatcaatttaatgcaatccactcagtccatgagcttggaaattgtattgtcttccagctggcatattataacacaattactgttcaaacaaaactttgttagaataattaaatatatacaaatgtgtcctttttacaatattaaacattatataatagtaatgttagcttatttgatcagtaaacttggttaagtttaagaaaaacaaacccaaatagaataaaatgcatgcttatatattagcattgataaaaaggagaagactgctgttgctagtaaactaaaattatagatctagtttcatttaccaaagatttacctttgttatagaaattggagttcttaaagcatttccaagttaactcacgtaagaatgttttaattcaagcacatttaaagtattagaagtttattttttatttttctagacattttagtaatattcatttttatgtatttttaatctactcagaatacagctcctataactttagaggctttgcagtctaattaagtatcatctaaagataggaagtttttttttttttttttttttgaaacagagtcttgctctgtcgctcaggctggagtgcagtggcaaaatctcagctcactgcaagctctgcctcctgggttcatgccattctcctgcctcagcctcccgagtagctgggactacaggcacccgccaccgcccctggctaattttttgtatttttagtagagacggggtttcaccgtgttagccaggaaggtctcgatctcctgatctcgtgatccgcctgcctcagcctcccaaaatgctgggattacaggcatgagccaccacgcccagccaagaagatagtttacagttaaagttttttctgaattatagaagcataaacatacagagtcaccaagagtgtatagtttcagatttaaaactttagccacaggtcaactgtaaacagagaaacacaaaaatctcagtccagatatcaaatagctgcactcctttctagtgagcacaaaattcttaagtattctaagcacaaaaataaacaagttaacaaacaagcaaaaacattagtaaacgagtttacctcttgtctcttacccaacagagaatatatctctatctaccatctacagagaccacaaataatcagaccataaaaacaaattcccaattatcactaccaccagtgcataactcattggccatgcacaaaccagaaacaaaaacaaaacacgagatcattagaaaggaaaaagaattacagaaacagaggttaagtaaatgtatagttctattgcggattgtgattcacttctgggagtcaagaagagaggtgtctgggcttaggctgcctatgaggtgcacctctccagcaatgtggcttaccaggctatgtcacatgaattttgggcatcttggtggaaacttcaaaactattaaagggtaatttttaaaagaggacataatcatcactctcatacaaatatcaagtgaacagatgctcagagagcagagtcaagagtcttgatgacatttgtgtaccaggttttcattattcctggtcccagataaatttctgttcttggggtctgtgagtcactgtgtatcttgacaacttcttcttttttttttttttaacatagtttgagtcaggtttcagttacttcatttaggaagcatttttaccggggccacaatgcagcgctactctaggaggtgctgtccaatacagcagccatcagccacacgtagctatttaaacttaaattactaaaaattaaataatatttaaaatttggtcacactagtcatattccaaatgctcaatagccacatggagctggtggctactatgttagataccacagacccacagggactttctcgtccccaagccatattgtaaagcagagtctacagcaaatagttgctgagtttacatctcagttcagtagactgagcaagaagcattctaagaaacttagaacaaactgtgatcaaaagatggttactttagtaataatgtaaaagagagtttctatataaaagtggatgcaaacaaaatcatatgtcaagtacaaccaagatttttattagatcaaaaccaggaagatttagtgtctgtgaggttgctgtttaaattattttcttacattgcaatggaaagaaatagattgtatgaaccaagtttctagtataagaaattgttacgggttgaattgtgtcccccaaaaaagtatgttgaagtcctaacctccagcatctcaggaagtgaccttatttgggaatagtgtcattgcagacgtcattagttaagatgagatcttgctggagtagagtgggcctttaatccaatataaatactgtatttaagagaagagacacagagaaaacatagggagaaaatggccctatgatggtggaggcagagaatgattggaatgatgcatttataagccaaggacaaccagcaaatagcagaagctagaagcaaggtaagattcttcaggtttcaaaaggaacatggccctgccaacaccttgatttcagaattcttgtctccagaactgtgaaaaaaagaaatttctgttgtttaatccatccaatacaataaaataaacatatctgaaagattttatttaattcatcaattaatgaggaaacgtctacaatatcacaaaccttcaaagactaaatcaaagtactacacatgtaaaaacaacaatgcttaaataaatgtacaagtgaacacaaaaatggcttattctgtgggagtgagagaaggatttggagaaggagcttaattgtatttccaatgggcaaaatttacttgtatggctaaggataagaatcatttgcattgctgttagtcatatacagttgaaagagttgtaaagtagctcaaagacaacaaaaggtacagacaatccatggatagtcgtggaataggagaacccagaatgtatgagtagacataacctttttggtacattttaaaatctttcatgatttcttcctgtatccataacaaaaagcttttaaaaccaacattcatttttaactttatattctattttttgaggccaaaatgatttagaaacttcaaaaaattatttacgaaggagtagtctaaattataagaaactgtaagttttctgagaaacagaaattaaaattctcaggtgagtgggaaggttccatttcttaaatccattttccatttttcttaaattttacttatgattgatttcaattcaaatgtaggaagacccagttaaaagtatagtagctaaatgaatttacagatagtctaagacaaaaatatgagtttgaataaagtttatttgattactatattaagatagaaatgttagctgctctaacaaacacctgtctctcagttttaatgaaataacattttatttcttgctcataggaagtccaaaggtattgggcagatttcttagatgtctctccttcaaagcataactcaggaatctaagttcctttcattatatggttctgccatttgggagcctttcacttccacacacacacagaacacaaatgaaaaacctcatgagagatgttaggtactaagcctgggtttgactttcagttcttgtctcaactaggcacgtggccctaactcaactgcaaagaattctaagaaatgtattcatcctgagtgcactgaaaaagacaacaggtttctcagcagctagcctattacttctatcatccttcttacttatataattaattgccagttacaactgttcctcgtaaaccatgataattgatttgacttatcttttttaaattcttttaatttatctctattaatttatagccaatggaaagttgcccaactttctgactttgtcactctgaagacccagtatggaaggttcttaacagcaaaagctgtatcacattcagaagaggacaaccacatggaaataaatgagcagtgaagctgacaggggtatcaatgtgtctttcaatgcttcgtgcatcatcagctatttatttcaatattttgtatgtcatcagcactttgtctgacagctccatttgttcacttttcatacttcttttgggtgaacagcatgtataagagctccattttggaacagcacattaatcttccctagttaagggatgacttgttctcacacttatcattgcacctctcttgtgatatgacatcaccccctcatttgctgagataaatgccaaacaaaaacatcacaccggcatctgaatttctacattgtctatttgatttgtatcacaactttgaaatataaggaaaggaggacactagtcattaatgaagctacttttttttcttggcgcttttatattttctacaagatttgtacttaatattgagaaactctgacagtcctaagccaattctgtggcttgcccagtaggttaaatcaagttgtgccagaaaacccagacatatacccatcttccacacaatggagtggcaaccagcctcccttgtccttcggcatccatggcaagtttgtcctctagagcactgagttatatgacccatgagccaatggctgcatttacaacaaagacccgtgaaagttgtaattcatttacaaataactcatgagttcagtcctatccagaaggtgatgctgaaatactgcacaataacaatgtttgtttgcctaaaaaggacattcagcagcaatggttcactacaggttaggcaccatatttcaattcctaatcaaattctatttggacctttcatttcctgaaatgaccctgaaaatgttatctctactctagctgtcacccttcctgcttgtgatctcagtttgaaatctaagtattagaaaccgtagaagactgtggctggatttggcattattccagttcactatgaagacacatttaaactgaaaaacttacataaactaagtgagatgaactggtctccataacaggagaaggtaatacgatgatggcttataatttggaataaaaatcatgtagtgtctttaatatctttcacccacaagacattatgtgtataaagacttagaaaattagaaaataatgggaaaacacccaaatgtccaagagcaagataataaataaataaattatgctatgctcaaataatgaaataatatgcaacagagaaaagcaataaactacaggcatgactgacaatgtgcaggattcccatgaacaaaaatgttagaagaaaatgtcaaatgaacacagaacaatatggtataagattttgtatacaaacttttaaaacgtacaaaaggatattatatacagctaagagtacctgcaattattgtactaaaaacacagtggaagataaataccggtggctccctctagaggcaaggaagaaatgagacgtgatcagagaggaatgcttaacggcacttcaaatgtgcagggcgtgttttatttgctaagctggtgttcactttatttttctttatactctccttgtatgtgtaaatatttgcaaaataaaatgtaataaaaccatgtaggtggcgatccctgcccttagaaattaaaaaaatcttattatggagaaaagatatttgcacattttttcaactttatatatattttattgttgcaataatatagactacaagaaattagcttattaaataaaatctaccttcattcatatatatataatactttgagttctggagcacgtgtgcataacgtgcaggtttgttacataggtatatatgtgccatggtggtttgttgcacccatcaacccttcatctacattaggtatttctcctaatgctgtcccttccctagcccccaccccccaacaggccccagtgtgtgatgttcccctccctgtgtccatgtgttcttatttttccactcctacttatgcgtgaggacatgcagtgtttggttttctgttcttgtgttagtttgctgagaatgatggtttccagtttcatccatgtccatgcaaaggacatgaactcatccttttttatggctgcatagtattctattgtgtatatgtgccacattttctttatccagtctatcatggatgggcatttgggttgattccaagtctttgctattgtgaatagtgctgcaataaacatacgtggacacttgcacattttttaaaaggtagacgacaacacaagatgacaaatgtgtaaattccaaatgaatcttacagataacctgataatattcctggagtcttcagggaaattttatttgtggaaataaaatgtcttattatcaaaaaagcagatggaaacagggagaggactaagaagaatatgatccatgtccatacaattataatgtatatcttcttactggaatgttatctccatgaaggcaggatcatctgttgtgtttagtgcaaatcttgagtccctggtatatcctaggtaaaacctacgtacaataactttcatggagggaagactggtattctctaataccagtattcttgagatagaaaactcatagacattctgacagtttagtaatatacagtgttttacacagcagttctcaacctcatagaactcctttttccagagaaaacatatggtagatattttaggtttaacatttgtggctgacagatctgtattgcatgagaaagagaatgtaagggtgtatctgataaagcaactagtttgatctcttaacctgaaccatgatgctcctgtagcaaataaaaattaaagtggaacaataacaactaaatctaggacacttcaaccattgatgtcaaaaatactgaattgagaattagtacacataaaataaaatttactctgttgtttgcacttgatctagaggttgtatggaaaaaaataaaaacagaaacagaaaatagtgatggattttaaatagttctttgtgtcctaaaaagccaaccaaacaacaacaacaaaaaacatagatctcagaggcctttgcaggctgtacatttcaagaccagataaaaggtgagaggtctcaagtgacagaccaagatgggtcacaggatgcctgagaaaccacatgattaggtgcagtcagacgaacaactgtagagtcagtgaaaaatcaatctggtagtgacagaagcctatgagtgaaatgtcttttccatattttttagctatcactctgtcaatacacgcacttgaaactggatgcacttgagaattaaaagatgttagatctataaagcattagaacagtgtctactaggtactactcaataaatactgtctactttgctgaagtaataagtatattaataacaaaatttttaaatattgaattaaatttttttattgtatatacagaagctccttcaatgctatcttttattttcaccatggcttcacattagcctatcacaaaattctactccttacctacgatctcagtgagaggttcttgcattaggatgtactaagaacaccaaagaatctaaagaactcacggttatggcaatttctacaatgaagataaacagggattatgcagtttggttgacattcaggtctccagtatgtgctctttggcctttcgtggtcacactatgtgctgctctgcttctatttatatcatcttcatcaaataacaggcctagtaggagaattgtaggcagggggtgaaggaaaaaacaaaatgtatgaaaccttcaaccaaacacagtgactttatgttaccagtactggtgggagatttgttataggactaaaaaagatgcagaagaattcatataagaatcaggagatccaaggcctactctaatttgccactaactatctgggtcaccatgggactaattccttaacgtctgtgagtacaatactatactcaaattagaaaatcttccagatccctcccattccatatttatgattcgttgatgttgcaccttcccagataaccaagaatcacctataaataggaaggggcaggcatttctcttttctcatcacattctcttttccaataggtgttactaccctctaatttttttttttaataaaatcctctagcaaaggcaatgattcctctattactcatcatgaacaagagtgccagatatgtttcctgactgatagaaatatctgaataaacacgtggtgcagtgtcaaaagccctggacatggaagacctgcagctaacctctgatttactacttactagcagttttactttagaagtgatatagaaattataatattggtggctattgtcttggagattttgtctttgatttcactcactttagagaagagcaaacaccctcagtgagacaggatagatactgccggagacatgatgggaacctagtgatttttcccccaagactttgaaaacaattttttggtttcaaagactgaaaaaaaaaatgtattaactataacaaaaaattcttcaagtaaagccccatgtgcaactttaatatattatcagatcgaaatgatatcattgtggtgaagagaagcaagagccttagggactttcacctgacttctcccacctcccttcccagccccacaaggcaataaaaactctgactcctaggactcttccaaagctcctccttgaagtggccatttgcatcacctgagagcatgaaagccttgaaaaatctcaggccccattccaggttcagtgaatcagactctaccatgtgacaagatccccaggtggtatgtgtacacagtgaacttgagaagcactgatctagaatacaattttaaaactaccaaattaccccatgctgttcttcctaattaaaatctctggcttagctttcccaatgcctacttcgcagtgttgttaaaaccatgagtgtgaactcattttgtaaagtacacattctataaacaaaaggtactcttattagttccaagttcctggaagtttccgctacctctctgcttgtgttctagcttaaaatcttgaaatttccattaaaataattctatatgataaagctatccccatgtcttagcagatattcactaggaaatcaatccttgtttgatttgcttatagaatttctgtgtaacaaataattccatatcagttgtttctctgatctctgcttatctaagtcactttctatgattgaagtatttaattgtgtgttatttgcactgtgtactgggtgagctgtatttgataagtcaagtgctttacccagtaatcacacttaaatccccttcccaattagtataccccaccttaaatatttcaaataatgaagtaaagtccattttaaaaaattaatacggctaaacaacatatgaactaataggttattaataaatgatggacactcaaatatattgaatgaatgaattaaaaatttgaagaaataaatttcaagaaggttcagcaaattcctcaccaactattgtatttaatcctttgtttttacctgaaaattcatttcagcgaggctactctgtaatgctagtttttttccaacttataatgtgatatgtaaaaacttattttggcaagtttccaaaaagctcaaaactatgcagctaacctaagttcatgatgaaaagatttgactcattgtgctttttgtgtgtacgctcactggttaattaatttaagaagaagtctcacttatataactgagatgttaaatggctggatgatctcatgattcccatttcagtacattgactttttttaaaaaaacttaattataagagttgtcattagattacttagaaacaagagtattagagtgtggattgattcctctctctgttttctttctataaaaactctacagatatatgcatctcctggaaggaaaagaaataaaattaaccccatatctatgtttaattgtcttaatgtgaaatatatgatattttcaatcaccagtatattgtatattcaatcatgtcattttacagctggatcttagagattactattacatatctcacactcatgccctattttctctccaaactggttgcatttccttccctatttctgtatattttattttattttttgctttcttgctctcttttacagtactttggaattttgaaagccaacattaaggtagcattaaggttatgaatttaaaatgctggaggtgagcataggcaaagagtaagtttcttcaagtaacactatatatgattaaaaacaaactacatgctttcaaaaatgcatgccataaggaagaaatgaggggtgggatgctcactgttatattgtatgaaaagaacacattaaaaagagtcatataatttgttttctagggtatagaccatgaaaaaggtatacttaaactcttaaatgcagtatattattcttccccattaaatactttagaaaaatttaatccaaatatccaaaaaaattttagtttattaagattgtaagtggctaatagcttcagattcagagggaacaagggggtagagggacagcccttcataggcagctaccatttaagtgttccattgtcatccttagtgtcaggagagctaggacttttaggttacagaggattttccaagtaaataatactgagtaactctgccaattgaagtctacacgatctgaaagagaaaataacacagaagtccccctttaggtttagttttaaatacaatattcactgagataataagaaactactagtgttccagaactgtagagcctagagcagcttgatgctgtctcacaataaactgacagagttcatttggaggaattcaaaattcgctcagaaaaatttctgaatctactaattttttttcaaagactataacttgtgattctagcataaaagataaaagacaaaaatatcaaaagtaactatagctacaacaatttgttaatggatttataaaattaaaagatataagttgtgacataaatagcataaaatatggtgggggtgcagagtgagagtgtagacattttgtatgcaattgaagttaagctgttattagcttaaaatagactgttataaccctaaaatgttacacataaactccatggtaaccaccaagaaaaaacttctagaagataccaaaaagataaaaagaaaggaatcaaagcataacactataaaaattcaacaaatcacaaaggaagacaaatcacaaaggaagacaaatcacaaaggaagacaaatcacaaaggaagacagcaagattggtagaagagaacaaaggaaatagtaataaaatggcaacagtaagttcttgcatgtcaataattatcttaagtgtaaatggattaaattcgcaatcaaaagacacggtaattagatggagtaaaattttgtataagtctattttcacactacctggccaggcacagtggctcacgcctgtaatcccagcactttggaaggccaaggcgggcggatcatgaggtcaggagatcaagaccatcctggctaacatggtgaaaccctgtctctactaatataaaaaaattagccaggtgtggtggcatgcacctgtagtcccagctactcaggaggctgaggcaggagaatcgcttgaatcctgtaggcagaggtttcattgagccaagatcacaccactgcactccagcctgggcaacagagtgagactccatctcaaaaaaacaaaacaaaacaaaacaaaacaaaacaaaaaatctacctgagactgggtattttataaaggaaagagcagttctgcaggctgtacaggaagcatggctggaaaaccttaggaaacttacaatcatggcagaaggcaaagggaaagcaagcacatctaccatggcagagcaggacagagagagagaagagagctaagggggaagtgctacacacttttaaacaaacagatcttgtgagaactacctcactgtcatgagatcaacagggtgaaattctgcccccgtgatccaatcacctcccactaggttcttcccccaacactggagatttcaattcaacatgaggtttgagtggagatacagaaacaaaccatattattccactcgtggcccctcccaaatatcatgtccttcttacatttcaaaaccaatcatgccttcccaacagtcccccagagtcttaactcatcccagcattaactcaaaagtacaagtccaaagtctcgtctgagacaagcaagccaagtcccttctacctatgagcctgtgaagtgaaaaacaagttacttctaagataaaatgggagcacaggctttgggtaaatattcctgctctaaatgggagaaattggccaaaacaaagaggggctacaagccccacacaagtctgaaacccagcagagcagtcattaaatcttaaagctcccaaataacctcctttgcctccatgtctctcatctaggccatattgaagcaaggggtgagctccgaaggccttgggcagctctgcccctgtggctctgcagtgtctagcccctgcggctgctttctcaagctggcattgagtgcctatggcttttccaggtttgtggtgcaagctgtcattggatctaccattctggggtctggaggacagtggccttcttcccacagctccactaggctgtgccccagtgaggactcagtggtggctccaaccccacatttccactttgcactgccctagtagaggttctccatgagggctctgcccctgcagcaaacttctgaatagacatccaggaatttctatacatcttctaaaatccaggtggaagctcccaaacctcacctcttgctttctgtatacccacaggtccaacaacacatgaagtaatgactcaagctgtaccttcaccccttttagccacggctagagctggagcagctgagatacagggtaccatgtctggaggctgcatagaccagcagggccctgtgcctggcccatgaaaccttttttccctcctaaggctccaggcctgtgatgggaggggctgccacaaaggtctctgaaatatcttgaagacattttccccactgtcttggctattcatattttgttcctctttacttatgcaacttctgtagcaggcttgaatttccctccagaaaattgatttttcttttctaccacttggtaaggctgcagattttccaaacttttatgctcctcttcccttttaaatacaaattctctttgcttatgcaaatggccataggattttagaagcagccagataacctcttgagtgctttgctgcttagaaatttcctctgctagataacccaaatcatctctctcaagttcaaagttccatagatctctagggcagtggcaaaatgctgccagtctctttgctaaagcatagcaaggatgacctttgttccagttcccaataagttcctcatctccatctgagaccactttaagctggatttcattgtccatattacaatatgtgttttggtcaaaactactcaacaaatctctaggaagttctgcactttccctcaccctcctgtcattttctgatccctccaaattgttccaacctctgcccattatccagttccaaagtcacttccacattttcaagtatctttatagcaatgcccaactcctctagtactaagtttttatgttagttcattttcacactgctataaagaactatgtgagactgagtaatttataaagaaaagaggtttaattgactcacagctcgataggctgtacaggaagcatggctgggaggcctcaagaaacttacaatcagggtggaaggtgaaggggaagcaaacatgtcttaccatgtcagagcaggagacagagagacagtgggcaaacagggaagtgctacacacttttaaacaaccagatctcctgagaactcactcactatagtgagaacagcaaggggaaaatccaccccccgatccaattaccttccactgggtccatcctccaacaatggggattacaatttaacatgagatttgggtgaggacacatagccaaaccatatcatcttttaaggatttatttttagaagatcatagggtataaacattcttatgacagagggcatgacataagaatttagaaaacagagaatttagaaaatagtccagaattgctgtccagaaaatattaactattgaaaaggaaataagcatttgaaatagaaatataaagttaagcataaaagtattaacatctaattattataaactttctgtaattgaagttgaactgttaggacaatttttaaaggcagtatagtggttaagcattgcctttgaagccatcctttatgggtttaattccattctgctatttgcttgttgggtattgtataattttctatggttttcataagcgaataccacagatttggtggcataaacaacagaattttattttcctaactctgaaggctggaagtccatgatcatggtgcagggttaggttctaatgaggcctctcctcttagtttgcagatggccatcttcttgctgtgccctcacatggtcttcttttctgtgcgtgtgcatgcctggtgtgtcttcctcttcttagaaggtcattggtcctattggattatagccccacacttgtgacctcatttaacttattaacctccttaaaaactctgtctccaaatatagtcacattaggggttagtgattcaacacatgaatattgggaggacacaattcaatccataacacgtatacttggccaagttactcgatgtctgcatatctgagttatctcatttgtaaaatcaaggtaataatactttattggctatgatgggattaaatgtgcttttatgcataaagcattcaagaacagtgcctagcacatggtaagtgttcaatagataagtagtgtcacatttaaaaattgaaagtttacatggacattgtatgcattaatcataatacactataaaaatagcttccataacaggatttctaaattggatacaataacaattcttataattattaggagtaattagtattaacagagaagaaatagaaacattaagcaagtaatccaaaatcatataatgaattgacagcatgattaagtgcaaatgtttcaagaaaagttatatccttttaattccttttaaattaaaataactgtcataaagaagactagtcatcttctatagtaaatatttttgaattttagtaggtagaaacatgggcttaaaaattttttaaatcacttggaagatttcacttatttcagcttttttaaactgctccatccacatagaaaataaacctcctaatacaactagctccaaaatgtttagtaggatgtttaagaataagaaaaatgggccagacgcagcggttcatgcttgctatcccagcactttaggagaccaaggcaggtggatcacctgaggtcaggagttcaagaccagcctgaccaacatggtaaaaccccgtccctactaaaaatggaaaattagctgggtgtggtggcatatgcctgtaattccagctactcgggaggctgaggcagaagaatcacttgaacccgggagacggaggttgcagtgagccgagatcgtgccattgcacttcagcctgggcaacaagagtgaaacaccttctaaaaaaagaaaagaataagaaaaataagtgccaagatactaacagcatccatattacctccttattgaaataaacttactggaaaatgaagcaacccacaagtaatacctgagttgtattttgtgaggagtagtaggcaaggtaacattgaaaatgcaaaggaaggtatgatatataaacaggtaattaagataatatagatattcacataatatctttgagtatagctgaaggacacctaactcagcatggcagagagagattgggcaagaattccagcatcatagtggtcatcttggaataaatggagaaatggcattgagctgaagatgactacaagatagctgccaataggggcagtggaaagggatagcttaggcagcagaggtgtagaagacaggcttaaatgtgacaaaactagaggcagagagagtagtaaaaacagctatgatgatccagccagaattagctagtggggataaaagaaaaagagcagaaaaagtggagaaacacttaagcattaaaagtattagaactatggatgggtagatatggaactgtgggagaggaaaaggattagacagcaattcaggaagaggagccatttagagggaagatgacacattcagatttcaaactattaggatcaacgtgatggtaagtggttgacggaagtttgaatatataaatctagagcatggggattaaggctgggctgtatagcagttgaaacaagagactggacaagatcacccatagagtattaaaaatgacaagcgggtagggagaagaaagggataaagtgaggtataaaaatatagtcagatagaagaaataatccctcgtattaagtaaatcagtaattatagtaaacagtaacctattgtacatttcaaaagaggtagtgatgaataattacaatgtttccagcataaagaaaatatgaatgtttaaggtgatggatatccaaataaccctgatttgattattacacattatgtgaatgtatcgaaatgtcacatgtaccacaaacacatttaaatttatcgtgtatcaataaaaaatattttgaccaatgacttagagacagaagcctggaaaacatcaatattaaaggaaaaaacacatagaagaaaaccatgaaggatccagaggagagatgagaaccagcaaaaaactgagttacagaagataaatgtgcagagattctaacataggggaggctttgataaaagcccattgaatatgccaaaaagaaattaatttgtgaccttagagatgtcagtgtctgtatggtgagggaactaggaagatgaacagattgtagtgaattcctctgagtaggagatgaatgtctagaaataccttagagtatttctcagcttatacaggcaagaaatagtgtctcacctaaggtaatatctctgtagtgaaacaaacatagacagaagtgttcaaagtaaatgatgtgcagagactagatggagaagtctggcccagatcggagactacagttcaagctgggattatcagcctaatgaaatgctttacttaggagaaaacagaatttcaaatggagaactaaccaatgacaaaagaaaatgcatcattatttcaaacagaaaacgaaggacccacaagcagaattagcagtaatgttgacttttgatgtcatgtcctgcaagttactcataaaggattccttaaataccctagactaagggcaggacaagtttcagagaatgaactgggcttgaatgtgtcagtaaagatcaagttgctccaacaaaaggaaaggagggtgggcacagggagctcaggaagcataggaatagattgacaggggaaaacatgattatacaagtttaatctgcatagatatgcaagatggacttcacagctaaactactaggacacatgaaagagtcagggaagtaaattatccaatggaataagaaatggacaaaggaagaaagaatagcatgtcacaagtcaaatacatgagagtttccatgcctggcacataagaatgtggtaaagtttttttgaatgaagaaatgaatgagtaaacaaattaatgaaaaaaataataaatgcaaagactggtcacagttttattgtttcactttatctaaattaagacagaaacacagtatccatccttcatctaaaatttccatttttaaattatgcatggattatccccctcacccccaaatttctctagacaagagttgactttataaaagaaaattaaaagttacttaagttttatttatttggaaaattgaaaagaattagtggaagccattgatgaaaatcacttacaaacataaagaattagttttcctttactattgtcctacttttcagtttcctctcagtaggaaagttattaatctgttgtgttttattgtaggatcataattgtacatttaattatacatacaacctgcactaagcataccctcactaaatggcataccttaataaagacgatagaacatgcctctataacctagcaaggtcaatctgtgagaagaataaataaaaacgtaatttagtaactgctagaataatctgagaaggtagaaatgaagatcatgtctggaggacaaaatgatttttaaaaaatagaaaatgatgaggtcacaaggtaaatgatgaaaaaggctggatttggagtcagaagacagttcttgttctgtgatttaccttgtagtctaggacaaaccatttaatgtgtcttgctttgttttcctcatccactatgcagaagccatagtgatctttttaaaacataaatcaaatcacatcgcttccctgcctaaaatcctccaatagtttcttcttacaattggaataaaatctaaccccatcctcgtgaccttcagcattgtgaacatgaacggaaccctgcctacctctttaaactcctttcttttcctttttccttttattcactgttcctagattgttcttaaaccctgtgaagctcacatttgctgtttgtctgcctgaaatactgagttctaggtcctcttgttgttgaatatttcttgttgtttaggtgtcagctcagatgctacctgctcagagatgccttactttactttctatagaaaaatagctaccttactctcatttaccaatctctttcaaataactataacttattttcgtttaactaagtatagaaaataatatatattatttattatttatgtctatatattgtgtgtgtcctcctatcaaacatctccttgcctatcttgttcatcactgaaatctttgactctggctaacaatttgcttcacaagaatttgtagatgaaaggagaaaaaaggaaaaaaaaggagaggagagaacaggaaaggagagaagaggagaagaaaggaaaggaatgaaaggggaaggaaaaaagaggaagaaagggagggagaaaacaaataaataaaatacttaggcaataaaatgagaaaaaatatgagaaactatactgggaaaaaactatcaaggcattgttttaatatcacttcatgcttgaatatatttaaataccacaaacttgttatgatttaaaggaactcaaaagactattgttttcgttctcttgatatttcagtgaagcctgcaaaatgtatatgtggggaagtgcgagtagatgtgtgatttaatttttgtgctttatttgggtgaaactggagtatgaagaaacataagagacaccctcagagcacaatcaagatgtcagcattcacaaacccatgtgctccccctctaaattatactcctccagatggcttggttaattttgaagtggataaagctaacagtgccagatcacacccaagcagtataaaactgtataagaacacaataaaacagtaataaacaatagactattttagtggcatatggcagatactgagtcaggccagcctcaaatgtaatctttggattctgtttaaaaatcagtgtctgaattatagcattagcattcaaagcactcctgtaagcagtaagcaactattctaaagaagagaaaggaagggtcagataaaggagaaaaggaaaacacaatggtcactggagaagaaagataaacaagaaataataagcagtgcttgcatgacaatctacaaggggaaatatagaattcatgaaagcattcaacaggaagagatggcaacaagtagaccaatatgaaggaaatgggtatgggaactcccagcaagaaggggagcaaaggagaaagaggaaaatacacacaaacaaaataacaattcctcccttctctgaatatctggacataaaatttattgtcttccattaaaatgacaaaaattgtatgttgcatcatcaaagttggaaatatattgttaaaaccttaactctgcaatccctaagtaaaaattccctcttctgaacatgtcttcacccctacactaaacccaaccatcttctcctgggagagggatgtttcagaacaatgagagatctgttcaaattgctgaaattaaagcttccaagtgaagagcccaagatatagcccccttttatctacttatatcctatttatagtacgcatttcaatgtaaacaagacttcctccataccaagtagagattgtacacctagacactaaataaaaaagtattttttccagaaaaatacttttcaagtgagaattttgttaatggatagtttcttgataacatgagtgatctgaataaagttagttatccacataattaactatatatggctgaataggaagtcccagccttcattcccacacagaaacatgaattgctcacaaatgtacacactaaacatttttatatgaattccagacttcaattaagatgttgcagtattccaagtgtgcacaaagtacagaatagtcaaattgaattgagttaagaagagcaatttcatttacctgcatcagcctctcccccaagttagcacagctcagtgccaagacagaatgcctcttcacatctttttcctctgggagaaaagaatagagcatgcctccaacattccagcttttcagagagctgcccaagaaacaggtctcttacttccttgattggtgtgcccacagaactagcataatttgaatgtctgggggtcactgaggacaatggaaagcagcaggtggcttgatatggttggcacagcatggcacaattgggggaggaagtgcacaagttaagacttcttccttggcaaggagggagaagagtggagcatgtgttggcattctggctcttcagagggctgcccaagggactagtctctgtcttgcctcacttggagcactcatggaactagcatagtttcgatgccttggagccactgagagcaaaagttaaaaaaaaaggcagtaggcagtttgctatagctaccatacctcagtaaaatcaagagaagatgcacaactcaaggcttctccttcaagagggaaggagaaaggagcgagaaatgagtctgtcattctagcttcttggaacaccagcttctgagaaactgatatctgtctcaccttactcagtgtactgataggaagcttgcatgccctggatatttgccagccactgacaacaaaagagagtgggaaacttgcagctgtagaaccagataacttgtggtggcacagacagacatcagaaaagataatgagttcctgaggggaaacaaaaaacacagtaagcctctctgagaaattgcatgcacaggcccagataccccaaaaagtttcagaggattccagaatctctttatgggctacttagtgggagtcttatctaaacaaagccagtctgaagactgggagaagtgacagatcctaatacaaagccacaaggtgcatgaaaaaacaaggaaacatggctcaatcaaaggaataaactaaatctccagaaactggatctacaaagaggtatgtggacaacttgaaagagaattcaaaataattgtcataaagatgcccactgagctcaaagaaataacaaacgaacagaataaagtattaagaaagatacagaaaatataaaaaagaagttttggagctgaaaaagaaaataaactgcaaaactcactagagaagtttaatggcagacttgatattcagaagaaaacatcagcaaacttgaatatgagtcatgtgaaattatctgctagaggctcaaaatgaaaaaagaatgacaaagaataaagaaaacctaagggacatacaaggcaccatcaaatggaccaatatttgcattattgttgtttcagaaggggaagagagagagaatggggcagaaacattacttaataaaataatggctgaaaacttcccaaatgtaaggatggaaatggacatctagatttgagaaactctgcacgctccaactaagatgaattcaaagaaatacacaccaagcaacatcataatcaaattgtcaaaagtcaaagaaaaacaattttgaaagcaccaggagaaaagcaacttgttatgaacaagagactaacaccagatttctcagaagaaaccttccaagacagaagagaagtgggatgatatatcaaaacactgacagaaaaaaaacctgccagtcacgaatactgtatccagaaaaactatcctttagtaattaaggaaaaatactctcccagataaagaaaagctgagggaattcatcatcagtagaccgccttacaagaagttctaaagggagtttatcaagttgaaatgaatggatgctaaacagcagcatgaaagcatacataaatacaaagctcactggtaaaggtaaatacataaaaacataaagaatactattgctgtgatctgaatgtttgtgtgcattcaaagttgatttgttgtcatcttaacccccaagataatggtatgaggaagtggggcctttgggagacaattaggtcatgggagccaagccttcataaatgggattaatgcttttacaaaagaggcccctgtgatcttgcttgcctcttctgctatgtgagaacacagagagaaggcatagtctatgaataggaagtgggccctcatcagataccaaatctcttgataccttcaccttaaactacccagcctccagaaccatgacaaataattgtttgttgtttataagctacacagcttatggtattttattacagcagccttaacaaactaagacaactgtaatattgtaacaatgctgtataaatcttttaattattgtataaaagttaaaagataaaagtataagaaataattataaaaatctagcaatgggtatacaatataaaaagatgtaatttgtgacatcaatagcataaagtatgggggaagttatcagtgtaaagtagattattttaacaataacatgttttatgtaagttttatggcaaccacaatgaaagtacctatatagcagatattcaaaagaaaatgagaaagaaatcaaaacatgccactacaaaaaagtcagaaaaatacaaagtaagacagtgagagcaaaagtgagtcaaaaagctatgagacagctaaaaagcaatttaagaagtggcaatagtaagtcctttcctatcaataattactttaaatgtaaataaatttaactctcgattaaaagactgatatagtggctgaatggatttaaagaaaacaagactcaactatatgctgtatacaagaaactcactttggactttaagacccacacaggctgaaagtgaaaggatagaaaaaataatccacacaaattgtagtcaaaaaagacagcaagagtggccaaatttatatcagacagagtagattttaagtcaagaactgtccaaaaagacaaagaaggacaaagacattatataatgatataagggtcaatctgccaggaatatgtaacaattataaatatacatgtgcccataatcagagcacccaaatacaggaagcaatcaatgaaagaatttaatagagaaatagacaacacacaataacagtagggaatttcaatataccacactcaataattgatagaacatccagacagaagatcaataaggaaataaataaataagaggatttgaaccagactatagatcaaatggaactgacagacatttgcagaacattccaccttgcagcagcagaatacatatttttcccaagcatgcatgaaacattctccagaatagatcacatgttaagtcacaaagaagtcttaacaaatttaagaagattcaaactgtgccaattatattttccaacaacaatggaatgaaacgaaaagcaaaggaaaatggaaaagttcttagatatgtgaatattaaacaacacactcttgaataatcaatgagtcaaagaataaatcagaaggtaaactttagaaaaatattttgagacaaataaagatgaaaagagaacataacaaaatatataggatgcaccatgaccaagtcagatttatccctgggttacacggatggccaaaatacaaaaataatcaatatgagacaccacattaacagaataaaggataaaaattacattattatcacaatatatgcagaaaaagcatctgaaacatttaacaccctttcatgataaaaacactcaataaactaatagaagaaaattacctcaacataatacaggctacagttaatgtcatgctatacagtgaaaaactgaaagcttttcctctaagatcaggaatcagttaaggatgcccactctgaccactttcattcaacatactactggaagtcctagccagagaaattaggcaagaaatataataaaaaggcatccaaatcagaaagaaagaaaaacaaattttcactgttggcagataatatgacgctgtatgtagaaaaccttgacaattacacacacacagacacacacacacatacacaaaccattagaactaataaaccaattacgcaaagttgcaggatacaaaatcaacacacaaaaatcagttgagtatatgtacattaccagtgaacaattggaaacaaaaatgaagaagacagtccatttacaactgaatacaaaagaataaaattcttagtaataatctaaactgagaagtattataaaatatctagacactgaaatctataaaagattgctaaaacacgcacacacacacacacacacaaatagggggcatgatgccataagccaaccagcccacaatgtcaagtttatcatccagaacaccaatgcggcagtggccatttcgattcggagtgtcttcttctctgaggtgcccataatagtcattgactgggttcaaattgatgccaattcctcagttcttcatgatgagttcatggctcacaaacttagattaattcccctcattagtgaggacattgtggacaagctgctatcctcccgggactgcccatgtgaagagttctgctgagtgcttggtggagttcaccctcgatgtgcagtgcaatgatgaccagatttgacatgtcacatcttgagacctcatctccaacagcccccaggtcattccagtgaaacaagatgatgaccctaatgactacgtggagcaggatgacattctcatcatcaagttgagaaagggccaggagctgagactttgagcctatacaaaaaagtgttttagcaaggagcatgccaagttgaaccttactgcaggggtggcttttgaatacaatccagacaatgccatgaggcatgcagtgtaccccaaacccaaggagtggccaaagagtgagcacttggagctggatgaggatgagtcacaggtgccctgtgaccccatgggcaagccagaaaggttttactacaacatgaattcctaaggctctctgtgtccttaagccatgtgctcttagccctcactggattgaagaagaagctgagtgatttaaaaactcaattaagccacgagatccagagtgacatgctaactataaactagctgcagcttgctgcttcagcaagaatggggattcaagccagcagctggatttggggggtctctcttgagactcttctagtttttggaaatctagtctactgttgcttgagcttcttggcaggtcatcagtaccaactagaagcgggtaatagattactagggatgccagcggcatttaagcaggacagttttttactggccctaactgctaatcgccagcagtgctccacagatcctaaaacatcccttttagcctgtttcctaatgcgtctgtaggggagccaaccggacttctctcctggttagttcagttctttactttaaacgctttctgtccaaaaggaataatttcagttgtaccttagatttctggtattaggattgaatgtcacagccttcattcaaagggcctataaacccttccagttctttccccaagtctgtcctactagcacttcaaattcacaggcatctttaatttgagaagtaaccttctgggaagagcatcaggccatggctgtgccctctcccctatgtagatacaatatttcactctctacccagcagttacaaaccccttcaccaccaatacctgattatttagtttggtgatggtggtggtggtagtggtggcagtggccagcaggagcaagggcccctcccacatacacagaagtatttcatttctcccaaatgaaggctctggccctgacctcttaacactgtctccagggaggaacatacacaaagcagttaattagcagcctggaaaaaacacagaaagaaagagatatttattgattaacagaagttgtgtttttaaaagtgtttatttttggcaatgaagagcacaacataatctcaaaaaagttaaaaaaagaaaagaagacacaaataaatggaaagacttcccacgttcatggattagaagacattgttcaaatgtccataccacccaaagtctacacatttaatgcaattcctattaaagtcatagtgacattttttgcagaaattgacaaaacaattctaaaaattgtacagaagtacaaatgaccccaaagtagcctaaacaatcttgacaaaaagagcaaaactggaggcctcaaactttttaactttagaacatattacaaagctatagtcatcaaaagaccatggtactggaataaagatagacatataggctaatggaacaatactgagagtccagaaataaacccacacatatacagtcaaatgatctttgacaggatgccaagagtacacaatgggaaaaggatagtatcaaaaaattggtgctggaaaaactagatattcacattcaaaaagaataaaattggatccttattttatatcatgcacaaaaatcaactcaaaatagattaaagacttaaacataagacatgaatttataaaactccaagaaggcaacatagggtaaaattttcataacatttgtcttggcaattaattcttggatatgacaccaaaagcacaagtaacaaaagcaaaaatagacaaatggatttacatcaaatgaaaaagccagaaactaaaaatcttctgcatagtgaaggaaataatcaaccgagtacaaaagcaacctacagaatgagagaaaatatttgtaaaccatatatctgacagggggttaatataaaaatatacaagaaactcaatagcagaaaataaaaataaaaataactatcttcaaagaagagatacaaatgaccgacaggcatatgaaaagacattcttcactaatcattagagaaatgcaaatcaaaaccacactgaggtatcatctcacactcattatgatggtcattataaaaaattaaaaattaaaaaaataaagtgttggcaaggatgtggaaaaatttgaaccgtgtgcactactggtaagaatataaaatgatgttgccactataaaaaaaacagcatagagattgatagaaaaattaaaaataaaaactaccatttgatccagcaatcccacttctgggcatttatccaaaagagctgaaatcaggacatggaagatatttgcccttccgtgttcattgcagcattattcacaatagataagaattagaaacaactggtcgggagcggtggctcatgcctgtaatcccagcattttgggaggccgaggcgggcagatcacgaggtcaggagattgagaccatcctggctaacatggtgaaacaccatctctactaaaaataaataaataaaaaaattagccgagcgcggtggcaggcaggtgcctgtaatcccagctactccggaggcagaggcaggagaatggcgtgaacccaggacggcgagcttgcagtgagccgagatcacgccactgaactccagcctgggtgacagagcgagattccgtctcaaaaaaagaaaagaattagaaacaacctaaaagtttatcagcaatatgtatggataaagaaaatgtactatatatttatacaatagaatattattcagccataaaaagaagaaaattctgttacatagatataccttgaggacattatgccaagtgaaatacgccagtacaagaaagacaaatagtacttgattccactatgtgaagtatctaaaatagtcaaactcatggaaatatagagtaaaattatggtttctagatgctaggaagagggacaaatgggaaaattgctgttccgtgagcataaagttttaatcatacaagagacaaaattttcacagatctgctctacaacattatgcttatagttaacaatgctgtaccatacacccaaaatttaagaggaaagatcttacgtgttttttaccacaataaaaaaattttgtaacattcacagaaaaaatttttttttactttatttgtacatataatggaaccttttgatctacagctcaaaggcaaaaagcaatcattccaaattaaattatcttggttaatatggctgtttacaatagggaatatggctcatcacactccaactgaaaaataaagactttctaatctcaatagcctggcctgtaataagaatataaaattataaacgcaaactttcaactcccaagtgaagcatgaattccagagccactgtatattgagagtggggagaagtgtatgcttaagggtaagattcatattttatattttatctccctggaggaacagcgtctctcctcaaagagagagccatcacagtgtaaagcataatacaatggcaatcaaaggggcatccacagataaccatgttcattacattgcctttaattgctttagcctaaaagacagcagcccaaaagtatagatccatggcagatcattgtacttaaacagtcaaatatgtatccttcatattttaaaatatagccactggcccaccaaataggagttctactgtccacttctctcacactgccttctacacagtataaaacctttcatcttgacataattagaagaatcttccaaacaagtaaaactatgacttgctcacatgcctacttttcccacatgaccgtggcaaaatcagatattgtcagacaacttgaggacctcaattcaccatagaattttcataaaatggttaagaggtaggatcctatggttcatggaggaaatttgggaagaattcatgcttaggctaataaaaaatacagttcattcattcatctccatgaagacaggaaaactatgccattctgatcttcactgtatcaatcaatggtctgtaattgttcagtaaaaattcttcaaatgaaggaatgtccaaagttgtctggattcagtctgtaaaagagtaattaagcttttgcttttgcttaatatacatgccttgacagtatattaaagtgcttaattaagcagcttttttatggtcacagaagtctttgtgatatttaacattatgaaatctacatattcagagccacctctagtctataaaattaaagtatttacatataatttaatcacatattttcttcacaaaaggcattatttaagatatggcaactaaatcagagaattctggacaattgcttttgttcataattttatccaaatgatgaagttcataattacacaatgttacagttatgaatatattaaggtagaccttaaaagctcacagcaaaagagtaacacagtgtctgagattgtgcaatgtaccaaagaggatattgactttactctggataatacgcagacaaatttacatttatgtcttaaacttaacccctaaccttataaatgattgaatgcacccagtggcttattttctgtaaatcagtaagtaacctcaaatgaatgcatcaattttcataatgcatgcattgttagtatcatctaatatttttatttcaagtaaataaccatattattcatgctagtagctggtacaaacctttaccattcttcttaaattacttagctggactcacccactcattttaacagatggccaagcctcctacctcacagagaaaatagcagccatcagtcacaaaccgcacctcttgtattatctgcatgttccccagctttctctccttcccttctgtcccaaaggatgtcttgcctgtcttccaaagataacactttaatctgtactcctgatttcatcttcttcctttcttcctctctatgtttactgagtgccttctgatgccagaatattctaagcctggggacacagtgtgaaacaagacacaaagcccctctccttgtggactttgcattctattatgtgtcctccaacgccttttcaatattcaccaccgttttttgaatcttcactgtatcctctgtcgtggctgttctcttttagcttacaaacctgtctaacttgtcctcatccttaaaatgaatctgcttattttgctgaatttgaaggcatgtatttccttcccttactgctgtacttctagaatcagctgcagtttctgtttctactttcacttccctttttcactcctcagtgcacagctatctatttttcttttgttctctgtactccagtgaaacatttatcctcagcctttgacacactcttccttcccttgagtcctcatgaatcctaggacagaatatagtttattcttctggctacactttttgctactgcttcattctctgcttgcaaccttactgtttgactccccaagatttcttctttggccttcttttctcattctgcccattcttcttgaatcatcctacccacacccatggtttcaactactacctatgtgctaacaactccaaaattctgttttcagagccttctgaattccttatctatattttcaagtactccaaaagcattctcatttaaatagccatatcatgtgctaaagatgtggtacgtattgccacagagaaacacagagaaaatattaccagctgtgattatagaaaagctccaaaatctcagtggcttaataaaatatgagtgttttgttgttggtggtggtggtgttggtttcatttttgctcacgtaaggtccagttggaggtggtggtggcggcagtgtggtgtagagggtaaaggtggttctgagacccaagttcatgaagaatctcccctctattatgtcgcttgccaggtcattcaagaaagttttatccagccagtggatgggaagagagtttggaaggggtggaagattttatgtgacagttttggaattgttatattttcactcacattccattgaacagaattcagtgacatggtcccacctagatccaaaggggttggaaatgatagtccatgtctgggcagccacttcatagcatcctctatattatgcaagaggagcaaatctttagtagttggttaaaagtgtttgctacagaaatccataggtgacctttctagacagaattttgtttctgatcagttgaataaggatcgcgaagagtgaaagtggagacgaacagggtgattcttttctggaagcacaatgttagtgtttaggtgctcatttaatgttcttagaaccaaaatttggctgttagggaaacgacaaagctcaggaagcaactgatttctctaccttccatttttatttcccttaatccaaacttcatataatttgaatgtcagagtgtcatatgttgctggatatagtttggatgttcgtcccctccaaatctcatgttaaaatgtaatccccattgtttgaggtggggcctcatgggaggtgtttgggtcatggaggcaggtgcctcatgaatggcttggtgccatccccatggtaacaagtgagttctcgctctggtagttcatgcaactgctggttgtttaaaagagtgtggcacctccctccactcacaccatgtgagaggcccactccctctttgccttccaccatgactgtaaactccctgaagccctcagcagaagtagagactggcaccattcttcttgtacagcccatagaaacatgagtcaattaaatctcttttcttagtaaattacccagtctcaggtatctttataagaacacaaaaacaacactaacacgttgccctccttcattccttattattttttctttaaatatatagttatttttctaataataaaagtatagattaatctttccgaaactcaattaattatttcattccctgagttaagacattcaataatatctccaatgattccaagaggaagtgcgaacacatatgatgtcatgaaaggcggtacaatggcactccagccaaccttacctgcctttcaccgagctttattgtctgctatcattctgtaccactttagcacccataaggtctattttccactgccagaaagcagatggcaacaaagaaaatgctggcagtactattccccatgtggtttttgtttagagtcactattgagaagcatcacacaagacatggaaagcaaatgcctccaaatccaaattccaaagattgggagggcattattccccagatattgtgagcagacacatgggtggtcatgagatttgaagcacattctgaatgaacacttgaaaatcacctcaataagtattctgcactgagatagtctttatctccccgaaagccttccaatgagaataaacttctaattccctgcattaaacatttcaaacttgcaatacgtagagtagctgagatttccttgaacaaaccttgacatataatgtccatcattatgccataacgctctcaagtagggacacacacacacacacacacacacacacacacacataaaaaccaaaattcttaccattaccaaaatccaattcattgttttgatacatgcttttctgtatggcatgtccttttcctgacatttctgtctgacaaaagtcctgttcatccttcaaattcaaataccaccgtctaactgagtccttccataattcccccaattatagacacatgctccttggggagcccataacatcttattcataccacttacatggtatttataacgtcatttatatgccctcaccttgtagagagaaattatgtttcattacactctgtggccttagttcttagtacaaacattgtcgtatagtaagcattcaataatgtgttggataaatggtccattttgaaacaaaatgtcattaatgtaggtgaacattttcttcacagcatactctgaaaattgggagagtaaacctacatgctgggagtatacttaaggctcactgaagcatttcaggcaccaccccctctctccagtaggacacaagcatgagagacagataaatgagcaatgggaagacacacaccatcttccacctctccctcacctttctcctctcaatctcttatcacttataaaattagttatttcatttattggcctactgggagtaggttttataccaatccctgactccagtatccaccattacacgctttttcctcctgaagacttactgtagagaaaaggttttctccatgttgtcacattaatggttctatgtgtctgaccttcctgtaggaggtgccctagttgcccagacaagtggtgccacctgcctgggtgcaggggaacatgctcctgacgcattgcaaggcaggagcagcaccgccaggagctaagccccaactgcaacattcgttttccttcattaacatagggtcaaaatggctccactttttaaaatggctcctttttaattaaattgatgccagcttctgtgtttcaccctatcccaggaattttcagtccgtgacttaaggcaaggacagagaaaaaataaataataatttgagtagccctttagcttggattttaatctccagaagctttgttcaggtcaactaccattcaacaaactcacagccacatattccattgattcatgctgcaaatatggcattgattgggcagtgaaattactggggtttttctgggggctagagtagactgataaaataagcgtgctctttaccatcttggagcttacagtttttggaggaagtaaaaggagaaaataaataaaaagaaactttcaatataatataaggtaagaggtaagttctataaagtaaaaatagagcagagcaacaggatagagagggtgggaaggggcagatggatcacactattttagatggtgtgggtaaacgtctccagtgtaatgaggagccttctgtgctagacctgagtaaaggaaataagccatagaaatggaaagatctacgggaagagcattccaaacaaaaaagaatagaaagatcctgaggcctggagtgtctaaagacactccacaagaagggctgatgtggcttcaactgagtagggggagacaagctggagaggcgggcaggggctagttctgtgagagtcttgcaacaggagtcaaaatttccacgtaggtctaaattattgtcacacttgtgacaagactttaattagggccatgctcaatgtgccttattcctcttgaggagtgaaaataaattaggcagtctagaataagtaaaaccaagaaagttatttctggtgtcaattgtcctgttatttgtcatgctacctattttctaaaagaaattaccttattaaagcatctcatttatttacacccaaagggctttgcataaactgaaattaaatcggtgtgagggcttttacaaacttgggggaaattacttctcagcctgaaagtagtaagggagattttgccaatgaccttatgaaatctttttaacttcctaggaatgcaatcatgttttcagagctttctgaataaaccttagagagatctattgttttagatatgagaacactgctatttctgcaaaaatcatccaggtcattagtggctgattcattcacatttctgcagtagctcagtatgtagagcaggctttgaaccagatacaaccagacttacaatcgattctcaatctttctaccactctgaacctcagttttacaaattaattgataatagaatcaaatgtagatacctggtctagtgcctggcacatcacataaactttaaactagtggttctttgtccttagccagttgtatttcatgaaacttgtaggcaagaacattgttgtacttacttccgtgcaaaatattctccaatgccatagtatattttgcccccctcattcacttttgcctttcaattaccatgtttcttacaggctaagtcagtttaagagccctccttcctccccaaatatgaaagccttcaaactggaatgggcctctgaggtaactaggaactgtgtcatatcatagatacgacaaacaaatagattgcaaacctatccaacaggactttaaacatatattctgagcctatctatttcatctcacagacccatattttgatttggaagacatttcaacacatgtaaattcactcccattgatgagtcagacacttaacctcagaatatggtatatgaatgctgtctgcttccaggatctatagcagcaatgtgttgcttgaagaaagaaaatatatagttgagcctatcacacatttgtttctggtttctttctgttacggagttttcaacttctaagctcctgaggagacatccttgacaaaatacacacacacacacacacacacacaagcacatgcatgcactcacacgtgcacacacacacacacactcactcatacttgctgtgtgtatgtaagggagcattttgcggattattccagaatctgcaaatcattaggctcagaggcaaacccagggtttactgattggcagttttgttcacttgcttccaatgcattgtcacctctatataaaaatgatctatcccgccaggcacagtggcttataccataatcccagtactttgggaaatcaaggagggtgggtcacctgaggtcaggagttcgagaccagcctgaccaacatggtgaaaccccgtctccaccaaaaatacaacaattagctaggcgtggtggtggatgcctgtaataccagctacttgggaggctgagggaggagaattgcttgaatccgggaggtggaggttgcagtgagccaagattgtgccattgcactccagcctgggcaacagagcgacacttcatctcaaaaaaccaaaacaaacaaaatgatctatcctacacaggatatggccctatctgcctattctgtaatgaactgtcccagacaatgaagcctgagacaagcccatagctaggttttatactaacatatggcatgactcctaagtctattcttgccacaaattggttatatatcattgtcagtttattaaaactcatctcaaaacacatgtataaaatttaagtagtaaaattacacatagatcctagacttccttaacaatctcaatgtgtgaaacacatttgccttcatccatggcgtttgatgcttttttcttctgaacacgcatggtcaggacattggggcagacttatctgagagtcagatttcctgaacattaaaggacactgaagaatctcagatgtgttgaggtttatatttttctacttttcccgactgggttctgagaagctagccgctgagttggagccatattgaggaaaacagatcagagaagagaattggaaagccactataacactgggaaaaggcaaagtaacccttttcaatattgtcaccttttcccttgtctttgatcagagttctttccttctatccctgagttttccatttggtttctatgccccccatccaccaaaacccacacctagtgcatcttatatatagtcttgtcatattgtttgtcttttcaacttcaacaaattggacagaggatggtttttaaatgtttccatttacagattccagttttcacctttactattttgaaatatgccaagcacttcatccgtgtcatcttcattagaattagtgatcattactattcataaaaatattgtaatatgaaacaaataaatgtcatctgcaagaaataatatcctaatttgctgaaaattccctaccttcaaaaaccgcaattaattttgcaccaacctaataaatcaaattcaaaaaacttttttggaaacattactcccagtgaaaacattcacatgttaacaatttgctttcttctttggatctcccttcttacccttccttatattgtcttacgcttaattttcataggtcattatttcgttaaagcaaaaaaataagggattaaaaataaattcatctttgcctggtacctacaaggaaatgccctaaatgtcattaataagaaacttctttccgtgtcactttttttttcctcaggttttttctattgcatgaacattatttgatggggtaagtgtaaaataattacagcaacacatatgttgcacgtagtccccaaaatacgaagcagcaaatttgtgctttttcataagtagagaaatagaaataaaataacctaaaatagtgtttccaaaatgtaagccctagatcagtagcaacaataccactaggaacttgttaataatgcaaattattaaggatctatctcatagatagatccttaatattcagtatctatctcatagatagatccttaatattcagtatcttaatattcagtatctcatagatactgaatcagaaattcagaagtgcagcccagcagtctgaagtttaaacaagttctccaggtgattttcatgtaccctaaagtttgaggatcactgacataaaggtggatttttctaactaggataaatgaattgtctctacctgtgtccatacctgaagatctttaaggagccctgcttcatgaccaacgacaaagtaacaaacttgttacacaagaagcccagagttaactgtggaagttgcctgttagtattgagaagattgaaatgggcctgggtatgtagcttatagaggaaaaatgaagactttatcataaaaaaataaaaatgcaaagactggtgaatctatgcaagtcacaatgtaactattttaacactattatatgttcataactattagaaatgaaacaaaaattcatttaagtaaactaaaagaatgtcacctgaggatgtgtggtaggcagaattctggcccctgtaatctttgtccttagttactcccaggaatattttaaattgcatggcaaaggggactttgaagatataattaaagtaactcatcagctgactttgaaataggaaagattatccaggtggacctaatctaaccacatgagcacttagaatcagaggtttttctctggctggtagcagaaggagaagtaaggttcaaagcataagaaggattagacctcctattttgggcttaaaaattaagggggccatgtgtgagggaaatacagactctaatataaaactggattctggaaactaccagtgagtttggaagcagattcttccccagaccctctagataagaagcattcaccctcacttacaccttgatttcagcctttgtaaagtgctgatctgagaggacctagctgagccatgctgtactcggactctgattcatggactgtaagataatgaatgggtattgttttaagctgccaaatttgtggtaatttgttacagcagcaacagtaaacaaatactaggtgttaattttaactgctgttacagtcatcccactttgaaaagagcctgctgcctttgccagcaaaagaaccaactggcaatttaagattcacaacacaaggtcttcaccagcttttgtaacatttagaatatctggatgatccttttggcttctacaaacaagcactccttcagcacatttgtcttgagggcacactcacttttcttgtagacaagacagcaagatctaatatttacataacctctggaaactaaaaagaagtacctgtctctttcttttgtgctcctgcttcagaaggatctttctatgtacaggaaacttagctcacatggtgcagggaaaagccaaaagatagctccactgccacagcttggcagactttaatacgtgacatattgtcagacctcagcacttacaggaaaacggagtctttcaaatgtgagttcagtccagcagtttttcattttgcagacaaagattatagatttaactctttttatgtaagggaagtatgaaagggactcataagtttatgaacatgatccacatagtagagtccccagtttcttagagaagtcatgctgacaaggagacctggagcaaaggggacacgtggtatattagtttttcagcacggctgtaatgaagtactgtagactggatggcttcgacaacagaaatttatttctcacagttctagagcctagaaatttacgctcaaactgtcatcagggttggcttcttctgaaggcccctctccttggcttgtagacggcagtcttctggtgtcttcacctggtcttctgggtatgtctgtgtcctaatctcctcttcttattagaacgccagtcatattggattagggtccacttccaatgacctcgtttgacatttaattacctctttaagattgttatctccacatacagtcacattctgaagtactggggtaaagacttcaacatatgaattttggaggaacatgattcagtccataacaggtgaagtccagttgtttcaggagtataacctcatctattcatgactgccagtgaccctcccagacaatgcatcagaaactttcccactgctgtcaaggaaccctagaagaggtttatcttccaattatgaccaaagaggataacaggtgtttttgcaaaacttaggtggtgggaagtaatacagccaagataaagcaaagtttcctgataaaaaacccagtggcttttctattgcattgtaccatcagtcttcatttacaacagaaaactcctcaagaaatcatatgcactctgtctttatcagagttaggatattccattacattagaaaatcattaactgtttatctctttgcattctctccatgcttcctgaagtatccatagaatgcagatgataattgtggcttaatatcatgtatttctttcacagaacataaaagttaattaaaataaaccttgacatttattgagtcacaatgttacagatgctgtgctgagtgctttccacacattatctcaagaaactcacaataactgtatgagctaaatactacggttactccaatgttacagaaaagagaactgatgtttaaagagattcaataccttaccaatgccaaagaaccagtatgtagtggagccaggtctaccaaagactatgccaactgcccctctgatagtgattgtcttctaaatatagtaagcaaaacctctgtcatagaatgaagaaaagtgacaacatcattcatgagttcccgtatatgatgaacaaatatgctggcaaaatccactacaatttttgtattattatataatataaggacaggtcatcaccttatcattacaaagtttgtttctgtatgtgaaatatttcatgggcttctaaaggtgtgaagcctctttctgtaacataccagagtataagattctctgtttttaacaaagcatcaccttcatatattaaaatgaaattaatcgtagaacgtaatcttcagacaaatgaccacgtactctggaatccaggtccaaatcactaacgtaatggctatagctgcatacttctaagaaagtggaaaaaagttatgggcattttcaagagaaaaacattagtgtcaagtaccgctttagcgaggacaaagagacatctcttatcctgaaagcaaacctagaccaattatttttcatgaacaaaaattaagccataacacactagtaaacttcttgctaggaaaaaacaattaatatttgaataacgctataaattcctactgatctatttcaagtaaactattaccacttcctagtaatatttttttttatttatctagtaggctgtggagagcagcttctgtcttttctcatcaagccttaagttgaaacaacgctgtctgcaaattcagcgccaagactaggactccagcttcattgaaaaccgggaggtctgctggaagcacctcaacacttatcctcatcctaaactctggagaggcacagcaccctctgctggttaaaaccctggggctacagcacaaatacccttcaaagaaatgaaataaagatttcatataaccctgtgctgcaaaaacgttccaccagcagattggcactaaaagaaatgttaaaagaatttcttttggcacagaaaaattataccagataaaaacttgaatctacacaaaggaatgaagagcaccgaaaatggtaaatatatgaataaatatagaatgagattgtcttcttttttaagtttcttaaaagataattggctctctgctcctttctgttccacaaacagccatgtgttcttgtgaagtgccaggcacatacctaagacataatggtaaaggtccaagtcaccagatttgtccacatagagcacctggactctagggcggctttaaaacttcaacaaagagtcatcatcaatgactccttcattgtataaacaacatggtgtacatattccagtatgatttaatacatggcaatttcagtggcactgttgaggctgagaacaagaagcttgtccacaatgggaaggccatctctattttccagaagccatatgctgcctacatcaaatgggttgatgctgtgctgaatatgttgtggagtccattggtcctggggctcacttaaatggtggagccaaaggggtcatcacatctgtcccttctactgatgccctcacatttttgatattcccaacttcaacacagtttccctcccagactccaagaaccatgagaagtatgacagctccctcaagattgtcagcaatgcctcaagtatcaccaattgccttcgccctctgataagtcatccaggataactttggcatcatgaagggagcaaagttcttatgatcactgataccagaagactggtaatggtccatctgaggaactggcatgacagggtggggctgcccagcacatcatctctgtgtctcctgaatctgccaggattgtgagcaaggttacgccagctgaatgggaagttctccaacttggctttctgtgtccgtgtcccaactgtgttggttgtggacctagcctgccatctggagaaagctccaattgtgatggcatcaagaaaatagtacagcaggtatcagagggcctgtaaggagcatccagggctacactgagaaccagattgtctcctttgacgttaacagtggtgcctactatttatcttttcatgctggggctgaattgttctcaaggaccactttatccagctcatttcctggtataataatgaatttgattacagcaagagtggcaaaccttatagtcaatgtgggcaccaaggagaagagccctgggccactagtcccagcaataacaagagaagaataaagaggttttcagctgctggggagtccttgacccaactcaatttcccaacacactaaaaagctcccactcccaacaaggtttctatcccagactccctgaagaagagaagcagcttagagagccctaccttgtcatgtaccatcaatgtaatacaaggtactccccccaaaaaagataatttttaaataaaaacaatatgctagggtttgtaatagatagaggttgtaaatgtataaaagtggcatatagaacaggaaggaggaatggaagtacattgtcatgaggcagagaaatgatatagtaagatttgaagacagactgtgataaattaaatatgcattcataagccctacagacagagcaatcactaaagtaataaagtggtgtagatagcaagttgagtggtgataaaatggtattcaaaaatgctgaaccaagaagatatcaagaacaagaaagaaacaaacaaaaccagaaaaaaatagaaaaaatagcaagatcattgattttcccaatcagattgatggctagattcaagataagtgggtggattggatttttttaaaaaagaagacgcagcaagaagcacacttcaaatattaatataaagacttagatagatttaaataaaggatgcaaaaatatatacaatacaattgataagtattagggagttggagtagctatattattatcaggcaaagtagacttcagaacaagaattattatttgggaaaagagggacattgcatgatgataaaggggtcaatcatgaacaagacaaagcaaatctaaatggacataggtactccagaagaaagcttaaacaaagtttagcaaaaattaatggacttgaaaggaggaagtgaaaagtctacaattatagttacagatttcaaaatttctctctaatctacagaacaattaaacagaagatcagtaaggatacagaagatttgaacaacagtctcaactaactggacctaatcgatagttatcaaacactctagccaagagcaacagaatatacattgacaatgaaaaagttgccatagacctggtggacctgagatataaaggaagtctcaacaattttttaatagacagttacaaattttattataattcataatagcaaacatttttactgtggtaaaataaacacataaatttaaccatcttaaccatttttgagtgtacaattcggtagcatgaagtatatttatattattgttcaacaaattctaaaatatcaaaataatgcaaatatggtttttgactacaagaaatttaagtcatcataaatgaccaacaattgagaaaatgaatgaaagcaaaaagctagacctttgaaaagaccaattatatcaatcaattaaacttctaactaggccagtcgagaaaaaatagaaagaggacataaattacaatgttttataaattacaaaagaagtatcagagcagaacctaagaatattaacaaaaagatatctggaaagtctcccaatatacggaaattaaataaaatacttctaaatatgccacagatcaaagaagagattccacataaatttagaaaatattttaaactaaaaaaaagagagcataacttatcaaaactaaaactgcagctaaagcagttcaatctatatattataaatctataattttgaatgcttatatataaaaaggtctaatatttatgctcagagcttctgtcataagttgctagtaaagaagagaaaattaaactcaaagagttagaaagaaagacaaataaaacccagagtgaaaatcaataacacagaaaatgaccaacaatggagaaaatcaatgaaagcaaaaagctaaatctttgaaaagaccaattatattgatcaattaaacttctagctaggccagttgagaaaaatagaaagagggtataaattacaatattctataaattaaaaaaggaatattagagtggaatctactaacactaaaaggaaaatgtaaaggaatattaattgattacatggaaatattatgaacaatcttctaccaataaatttgacaacatagatgaagtgataaaattattgaaaagacacaaattaccaaaactgacacaaaaattaataataaaattgaatatacttgtatgaattatacaaatagagtttataatttaaaatctttgcacaaacaaaatttgagtctcccaaagtcttaaaatataagcaaatcaaatccagcataatttatccaagaatataaagttgattagatattcaaatgtcaataatataatattttaaaaaatacttagagaaagcatctgattatctggatccacaaagaaaagcatgtgacaaaattcagtaccatacataaattaaaaaaaaaaaaaaaacccttgcaaactaggaatagcgaggagtgtatgcaacccaataaagggaatctttgaaaaacatacagaaaacatcatattcagaaggaaaaatggaacattttccccataagactggaacaaagcaagaacctctcctctcaccattttgattcagtgttatgttgtggctatatgtcttacattattttattggccagtaaatatgtctatttacaggtaacatactcttccatgcagaaagtcctcaagaatcacctaaaaagctaataaatgaattttacaaggctttagaatacaaggatacaacgtcaatatctatgtcatctgttctttccatatgctagtaatgaacaattggaaaattttaaataaaacatttaaaccagtacagtatccaaaagcatgaaatacttaagagaaaaatctccatcccagactcccagaacaataagaagtaagataactccctcaagattgtcagcaatgcctcatacactatatgctgaaaattataaaaccttgctcagaaaaattttaaaaagaagccctaaataaagggaaatataaactatgtagattgaatagaagacttaagattgttaaattgtcagttctttctaaactgatctacatacttgatatggtttggctgtgtctccactcaaatctcaccttgaactgtatttaccataatccccatgtgtctttgtctgagggatccgttgggaggtaattgaatcatgggggtggttaccctcatgctgttttcctgatagtggatgagttctcatgagatccaatgggttgttttgtttttgtttttgtttttttgagactaagtctcgctctgttgcccaggctggagtgcaatggcacaatgagatccgatggttttataaggggcttttcccccttttgttctgcacttctcattcctgccaccatgtgaagaaagacatgtttgcttcctcttccaccatgattgtaagtttcctgaggcctccccagctgtgcagaaatgtgagtcaattaagcctctttataaattacccagtctcaggaagttctttatagcaacatgagaataaactaatacagtactcaaaaaattgcggttaaaaatcccagaaggctaatcatagatattgacacactaatttaaaagtttatatggagtccattccaagatggccgaataggaacagcaccaatctgcagctcccagcatgactgatgcagaagacgggtgatttctgcatttccaactgaggtacctggttcatctcactgggactggtcaaaaagtgggtgcagcccacagagggtgggccaaagcaggatgggtcatcacctcacctgggaagtgcaaggggtcaggggatttccctttcctagccaagggaagttgtgacaggctgcactgggaaaattggggcactgccaccttaacactgtgcttttccaacattcttagtaaacagcacaccaggagattatatcctgcacgtggctcagtgggtcccacgcccatggaggcttgctcacttctagtccaagactgaactgtgaggcagcaagcttggctgggagagaggcatccaccattgctgaagcttgagtaggtaaacaaagcagccagaaaggtcaaactgggtggaacccactgcagctcagctaggcccacttgcctctgtagactccacctcggggggcagggcatagctgaacaaaaggcagcagaaacttctgcagacctaaacatccctgtctgacagctctgaagagagcagtggttctcccagcacggtgtttgagctctgagaacagaaagactgcctcctcaagtgggtccctgacccccgtgtagcctaacttggagatacctcccagtaggggctgactgacacctcacacagccgggtgcccctctgagatgaagcttccagaggaaggattaggcagcaatatttgctgttctgcaatatttgctgttctgcagcctccactggtgatacccaggaaaacagggtttggagtggacctccagcaaactccaacagacttgcagctgagggacctgattgttagaaggaaaactaacaaacagaaaggaatagcatcaacatcaaaaaaaggacatccacaccaaaaccccatctgtaggtcaccatcatcaaagaccaaaggtaggtaaaaccacaaagatgaggagaaaccagagcagaaaagctgaaaattctaaaaaccagagcaccctttctcctccaaggatggcagctcctcactagcaatagagcaaagcaggacagagaatgactttgacgagttggcagaagaaggcttcagaaagtcggtaataacaaacttctccaagataaaggaggatgctcgaacccatcacaagaaagctataaacattgaaaaaagattaaacgaatggctaactagaataaacagtgtagagaagaccttaaatgactggatggagctgaaaaccatggcatgagaaatacgggatgcatgcccaagcttcagtagccgatttgatcaagtggaagaaaaggtatcagtgattgaagatcaaatgaatgaaatgaaatgaatgaaatgaagtgagaagtttagagaaaaaagagtaaaaagaaatgaacaaagcctccaagaaatatgggactatgtgaaaagaccaaatctaggtttgactggtgtacctgaaagtgacagggagaatggaaacaagctggaaaacactcttcaggatactatccaggagaacttctccaatctagcaaggcaggccaacattcaaattcaggaaatacagagaacaccacaaagatactcctcgagaagaacaaccccatacaattgtcagattcaccaaggttgaaacgaaggaaaaaatgctaagggcaatcagagagaaagattggattacccacaaagggaagcccgtaagactaacagctgatctctcagcagaaaccctacaagccagaagagattgggggccaatattcaacattcttaaaggaaagaatttacaaccgagaatttcatatccagccaaactaagcttcataagtgaaggagaaataaaatcctttacagacaagcaaatgctgacagattttgtcaccaccaggcctgccctaaaagagctcctgaaggaagcactaaacatggaaaggaacaaccaataccagccactgcaaaaacatgccaaattgtaaagaacatcgatgctaggaagaaactgcatcaatgaacaggcaaaataaccagctaacatcataatgacatgaccaaattcacacataacaatattaaacttaaatgtaaatgggctaaatgcaccaattaaaagacacagactggcaaattggataaagagtcaagacccatcagtgtgcggtattcaggagacccatttctcatgcagagacagacatagtctcaaaataaagggatggagggagatctaccaagaaaatggaaagccaaaaaaaaaaaaaaaaaaaaaacaggggttgcaatcctagtctctgataaaacagacgttaaaccaacaaagatcaaaagagacaaagaaggccattacataacaataaagggatcaattcaacaagaagagctagctatcctaaatatatatgcacccaatacaggagcacccagattcataaagcaagttctgagagactacaaagagacttagactcccacacaataataatgagagatttaacaccccactgtcaatattagacagatcaacaagacagaaggttaacaaggatatccaggacttgaactcagctctgcaccaagcagacctaataaacatctacagaactctccacaccaaatcaacagaatatacattcttcacagcaccacatcacacttattccaaaattgaccaaatggttgaaagtaaagcactcctcaccaaatgtaaaagaacagaaattataacaaactgtctctcagaccacagtgcaatcaaactagaacacaggattaaaaatctcactcaaagccgctcaactacatggaaactgaacaaactgttcctgaatgactactgggtacataacgaaatgaaggcagaaataaagatgttctttgaaaccaacaagaacaaagacagaacataccagaatctctcagacacattcaaagcagtgtgtagagggaaatttatagcactaaatgcccacaagagaaagcaggaaagatctaaaattgaaaccctaacatcacaattaaaagaactagagaatcaagagcaaacacattcaaaagctagcagaaggcaagaaataactaagatcagagcagaactgaaggaaatagagacacaaaaaacccttcaaaaaaatcaatgaatccaggagctggttttttgtaaagatcaacaaaattgatagaccgctagcaagactaataaagaagaaaagagagaagaatcaaatagacacaataaaaatgataaatgggatatcaccaccgatcccacagaaatacaaactaccatcagacaatagtataaacacctctacacaaataaactagaaaatctagaacaaatggataaattcctggacacatacaccctcccaggactaaaccaggaagaagttgaatcactgaatagaccaataacaggctccaaaattgaggcaataatcaatagcttaccaacaaaaaaaatcgaggaccagatggattcacagccgaattctaccagaggtacaaggaggagctggtaccattccttctgaaactattccaaccaatagaaaaaaaggaaatcctccctaactcatttcatgaggccagcatcatcctgatacaaaagccgggcagagacacaactaaaaaaagagaattttagaccaatatccccgatgaacatcaatgcgaaaattctcaataaaatactggcaaactgaatccagcagcacatcaaaaagcttatccaccaagatcatgttggcatcatccctgtgatgcaaggctggttcaacatatgcaaatcaataaacataatgcatcacataaacagaaccaatgacaaaaaacacaagattatctcaatagatgcagaaaaggccttcaacaaaattctatggcagttcatgataaaaactctcaataaactagatattgatggaatgtatctcaaaataataagagatatttatgacaaacccacagccagtatcatactgaatgggcaaaaactggaagcattccctttgaaaaatggcacaagacagggatgccctctctcgccactcctattcaacatagtgttgaaagttctggccagggcaatcaggaaagagaaagaaataaacggtattcaattaggaaaacagtaagtcaaattgtccctgtttgaaaatgacatgattgtatgtttagaaaactccattgtctcagtccaaaatctccttaagctgataagcaacttcacaaagtctcaggatacaaaatcaaagtgcaaaactcacaagcattcctatacaccaataacaaacaaacagagagccaaatcatgagtgaactcccattcacaattgcttcaaagagaataaaatacctggggatccaacttacaagggatgtgaaggacatcttcaaggagaactacaaaccactgctcaatgaaataaaagagaacatgaacaaatggaagactattccttgctcatggataggaagaatcaatatcgtgaaaatggcaatactgcccaagatgatttatagattcaatgccatccccagcaagctaccaatgactttcttcacagaattgtagaaaactactttaaagttcatatgtaaccaaaaattaacccacattgccaagtcaatcctaagccaaaagaacacagctggaggcatcacgctacctgacttcacactatactacaaggccacagtaaccaaaacagcatggtactggtaccaaaacagagatatagaccaatggaacagaacagagccctctgaaataacaccacatatctacagccgtctgatctttgacaaacctgacaaaaacaagaaataggcaaaggattccctatttaataaatggtgctgggaaaactggctagcctgtagaaagctgaaactggatcccttccttacaccttatacaaaaattacttcaagatggattaaagacttaaatgttagacctaaaaccatacaaaccctagaagaaaacctaggcaatagcattcatgacatagacatgggcaaggacttcatgactaaaacaccaaaagcaatggcaacaaaagccaaaattgacaaatgggatctaattaaactaaagagcttctgcacagcaaaagaaattaccatcagagtgaacaggaaacctacagaatgggggaaaatttttgcaatctactcatctgacaaagggctaatatccagaatctacaaagaacttaaacaagttaacaagaaaaaatcaaataacccccatcaaaaagtgggcaaaggatatgaacagacacttctcaaaagaagacatttatgcagccaacagacacattgaaaaaatgcttatcatcactggtcatcagagaaatgcaaatcaaaaccacaatgagataccatctcacaccagttagagtggccatcattgaaaagtcaggaaacaacaggtgctggagaggatgtggagaaataggaatgctttcacactgttggtgggactgtaaactagttcaaccattgtggaagacagtgtggtgattcctcaaggatctagaagtaaaaataccatttcacccagccatcccattactgggtatatacccaaaggattataaatcatgctactataaagacacatgcacctgtatgtttattgtggcactattcacaatcgcaaagacttggaaccaacccaaatgtccatcaatgatagactggatgaagaaaatgtggcacatatacaccatggaatactatgcagccataaaaaatgatgagttcatgtcctttgtcgggacatggatgaagctggaaaccatcattctgagcaaactatcacaaggacagaaaaccaaacaccgcatgttctcacttataggtgagaactgagcaatgaaaacacttggacacagggcggggaacgtcacacaccagggcctgtcatggggtgggggtactggggagggatagcattaggagaaatacctaatgtaaatgacgagttaatgggtgcagcacagcaacatggcacatgtatacatatgtaacaaacctacatgttgtgcacgtgtaccctagaacttaaagtataataataaataaataaatataaataaataaataaaagtttttatggaaacagaaggaaattaaatagccaaacaattttggaaaacaaatataaaagatgactaaatttacagaaatcagaaaaggtagtgctaaatgtttttttaaaaagatatatggatcaataaaatagaatagcaaactcaaatatagaatcatacagacgtggttaatagattttcaatatagatgacaaggtaattaaatgggagaaagaaagtcttttcaacaattaatgctggaataactgaataactatatggaaacagttgaaattcgaccctcacttgacaccacacacaaataaaactcaatgtggctcatcaggctaactgtgacatttctagcaaaaaaaaaaaatgagaaatctttgtaagcttgaagaaggcaaacttttctagactggacacaaaaaacatgaactataaacaaatggtatatgcgaatatattggaccttattaagattaaaaacttctactcttcactaaaaaatgttaagaagtgaaggaacaagccacaggttgggtaatccataatctggcaaagaatatatctgcagaaaatataaataactcttaaacttaaaaataagaacatgcgcacacacacatacacacacgcaatttaaaatgtccaaaaggtttaaacagacactttctaaaagaagatataccaatgaccaataagcacatgaaaagatgctatattgttaaggcagactacacagactcaaaagaatggctaaattttaaaagacaataccaagtgatgaagaggaaacagagcaacaggaattctcatacactgctggtaggaatacaaaatagtacaattactttggaaaagagtttgacagttttttcaaagggttaaaatacatacctactatataatctggagattccactcctacatatttgtttaacagaaatggaaacatatgttcacaaagattttacttgaatgttcataagcagctttattctcacagtttccaaaacctggaaaccagcaaaatttctaacctcaggtaaatggttaaaatagaatgtggtatacacatacaatggaatataacactgcagcagaaaaagatagactattgatgcagtaacatcacagatgaatctcaaaaatatgctgagcaaaagaaaaacacaaaagatttcattaaaaattcatttatatgaaatttttaaaaaggctaaactattttattgtgaaaagtaaataatttgttgcctgggcccagggatggaggaattgactggaagtaacatacgggtacttttgagggagtgatgaaagtattctatgtcttaatttggtggtacataagagttatacatttttttaaactcattatattgtatacttaagatgcgtgcattttattatatgtaagttatgcttaaacaaaattttaaggggaaaaaaggaaaaacttgggggccattctcaaacttaacaatttgaccaaacaggctatgttctttaaaacttaatcccctcttctcagtttgaaatgattcccagaaaactcctactctttcctcacatgtccgtgatatttgccctttgaacttattctcttaagaagacactctacttctaacctgggatgttcttgttaccatcaccacccaacctgcagatccttctgggaaataggatatagatttctaaactatgtcctcactactaactaactaaaacgggtataccgatattctttgttttaccacttttactagatttaactgtggagaaaaagtcatagatgatgaccataaccaagaatggagaaaactacttacttgcccaatacttcacaagggcataaaatatgctaaccattctaaggtttatgtcaatctatgggaaatgctaaatatttggctttggaatcagtctacaaaactgagagtgccctggatgttaggatgagttagtggatctttctatctctcctcagaatttatttcttattctaaaagccaagactccacctttttctgttaatatcttcctagttctcatggaaataataataatgaacaagcaaatgattgagtgaatgaatgacattcccatggttcttctaaatagtcactttaatgagaacattctaagagcaggctcttacaataggctaacaggtaccacacgtatttctgattttgaacttaagttgctcacccatacctagtctattgatcatcttttacagagaagtagaaaacatattcatttacagatgttcttcacagttgaaagttctcttgcttattaccttcaaatgtgtgaaataatggatggtgacagcagttctttctttgcagagcattcaaagagataacctactctatggttggcagccatggcaggtgtctacatggcccatcagaggaaatgataatttcacagtttatacagtgtgttaataggtttggttgtgaaaacaaaccaccctaaaatctcaatactgtggtttgcaacaatagatgcatttttgactcacaagtctgagagttgctgttaactctgctcagctctgctccaagtatctttttatgctgggacccaggctaggcagatgaagaattctatctgctaaaacatggcttatattatgtccatgtacatcccctaataaagtcatatgtccaagcttaccaatggcactgtaggtgtattctctctagtggattgcactagtagtcagatggcaaaaggagtggatgtacacctcttgggaaaggagcagacaattgggaacaataataatttccaccacatgtggttaactaaactaaaaataatcaccatgcagaaaaaggccatgctgtcccttgccacttctcaagtcatctacaacttaagaatatagaaaaagcaatcattactcccttgaaatatctgcatagcgcctaatattgagtacaaaaatgcaggctaaatagatatgaaaagagatatggcagtttctggaaaaagaccttgaggttgtggcttgtctgccattcaccagatgcacaaatcaattacacagcaagcattaaagcctggaagacaaaaaaaaaaaaaaaaatctgattgaatcaggagggaagctaaatactctttcattcatctgttctgagtgaaaaatatacaaaatttaaatgaaaataatttcctccagctacccaagtgtgatttactttaataaggcactaattgatatgttaaacttgctattttcaccacgtcttcaaatcttattatacaagtcaactagccaccgagataaccactgtgatctcctctaaaaagcctactgaaaacaatcctggtcttagccaattcactttttgttcataaaagagagctaaggagtcctaaattacaaaataattattttgaagcccagccttgagtgcagataaacaggtccgtaaaggtggactctagaggtgaaatggcacaaaagaattctactaccttatatacttgatgtaaatattttggataagtctccttccaatttgctttataagagagattcagaacttgaagggctggccaaacaggctaagttttctagaaattcatggaaaaaaaataaggaaatatctgctaagaccagaaccttcttgttttatgctaagtaattaggaagataagagcttcattgagtttactaactagtatcaccaaaatcaccatccaagggaagggaatgtagccctaagagccttacaagtaaagtaggccagcaacactttctttgttagaaattaagggaaaccactttccttctgtggtagccgatttcccactgattcctgtctcctgctatttacacctctgtagaatccctcccactttgtagcaaggttggtttttatggccagtagtatatggcttaagtaatggcatgtaattaccaagattagttggttataaaagttttattttcggccaggcgcggtggctcacgcctgtaatcccagcactttgggaggccgaggcgggtggatcataaagtcaggagatcgagaccgtcctggctaacatggtggaactctctctctactaacaatacaacatattagccgggtgtggtggcaggctcctgtagttccagctactcgggaggctgaggcaggagaatggcatgaacccaggaggtggaggttgcagtgagcccagatggcgccactgcactccagcctgggtgacagagtgagactctgtctcaaaaaaaaaaaaaaagttttattttcaccaagtcttgattaaaaatcttggcagcttctgccttgggcccccctctctctcttagatcactcactctagggaaagcaagcttctatgttttgcactgccctatggagaggccaatatgacagggaactgaaagaggcctctggccaacaagcagaaggaaaacaaggccctcaatccaacactctgtgaggaactgaggactgacaacaactatgtgaatgaactcaagaagatccttcccagttgagcttttagatgaatctcaaccctgactaacaacttgactgaaaaaacaagacagatcttgagctggaccagctagctaaaccatttccagattcaagacccacaaaatctataaaataataaaccgtggttgttttaacctgctgttttagagtaatttgttatgtaacaatagatatttaatatatcctcactgttaaagttgtgtctgttagatcttattcttcaaagaacagagacaaaaataagcctgtgttctttgttccttgcttcttctaatttttctttagtattaatgtcaatattttatcatatgcaccatctaatttctggtaatatcaagactcttaaattatatatatatatatatatataaaaaatatatataacttaactggtttgttcttatgctgctaataaagatatacccaatactgggtagtttataaagaaaagaggtttaatggactcacattttacatggctggggaggccacaggaaacttataatcatggtggtagagaaagcagatgcgtccttcttcacatgatgacaggagacagaataagagtaaaggagggaaaagccccttataaaactgtcagatcatgtgagaattcactcactctcatgagaacagtatgagggtaactgcccccatgatttaattagtttccaccaggtcgctcccatgatatgtgggaattatgggaatagttcaagatgagatttgggtggggacacagccaaaccatatcaagggtcaatatctatcaatataaaatttccctttgtagactgggaggttaaaaatctactttttgtgatatataattcattttacacgcattgggtaatgtaatatccagtgataagatagtgttcttgttgcttctgttagactatcacaacagtccccaaacttttccaatttttaaataatcacaatagagaaaatctagtataatattaatgtttatatcattaccacttatgctactttggggcatcattttttatatattttattttatttattttttattttttagagacagagtcttgctgtattgcccaggttagaggtcagtggcatgattatagttcactgcaacctcaaattcctgggctcaagcaattctgcctcagcctcccaagtagctgaaactacaggcatgtgccaccgtgcctggctaattttttttctttttttttttagtgacaaggtttcactaggttgcctaagctgctctcaaacttctgggctcaagcaatcctcccaccttgacctccgaaagcactgggattacaggtataagccaccatacctggcctcaatattattttaatacttatcacactaacttgtgaaacaaaaaagttcttattaaattgtgttgttcaacattataaatgcttttatcgagagattcacatatagaagacaaaaaaaagtagtttgaaagtaaaatggaaagtaaatatcaaatgaatatttgttattaagacgtcctacaatttcagtgtggccttggaaaaatccaaccttgatgttactaaaatttgagaattaagctttatgtatatagtaaaaactagtttgaacaaatttttcctcaggttacactgacttgaattgattaaccagttggcagatttgataaattaacttggttagtagtgacataaaagttaacatataatgagtattttataataaatgcaagcttgtgtacttgaaacacctgagcacagattttgttactctaaatgggagaaggctgaagtttttatttatttatatgtatgtatgtatgtattcatttcttgagaccaagtctagctctgtcacccaggctggagtgtagtggagtgatcacagctcactgcagcctctacctcccgggttcaagctattctcccacctcagtctctttagtagctaatattataggcgcccgccaccacactcggctaatttttgtatttttattagagacagggtttcaccatgttggccgggctggtcttgaatttctgacctcaagtgaactgcctgcctcggcctcccaaagttctaagattacaggcatgagccaccgtgcccggatgaaggtcgaagttttaaaaattataactaaattgtccatggttatactgatagtaagtagcagaggatttatagacaacacgtcttcctctagaatccctagttttatcactgcactgtactgtatgtagttcaggacccatgtgactgataatgtacttctccattcttcattatcattctttatctaaactcctacaggtctaaattcattctatgccagaaatgcaacagactgaaaatatcgtgtcccccagaattcatatgttgaaacataatctttggtgtgatggtatttgcaggtggggcctttaagcagtgattaggtcatgagtacagagtcctcatgaatgggattaatatcctaataaaagagaccccagagagctccctcacttcttctgccatgtgacaacagtgataagttggccatctatgcacctgctggcatcttgatcttggacttcccagcttccagaagtacaagaaatacatttctgttgtttataagccacccagtctatgctattctgttatagcagcctgaatggaataagacagctgctatggtttgaatatgttcccttaaagttaacgtgttgaaaatttgtcattgttacagtactaagaagagggacccttgagaggtaagtggattaatgcttttattgtgggagtgtgggagttattgcaagagttcagccccctttttctctctctgtctcaagcactcatgtgcccttccatatttttactctgccacccctctgccacccctctgccatagaataatgtagcgtgaaggcccttgcaagaggttggaaccatgcttttggacttcccatccttcaaaactatgagccaaatacacttctattgtttgtaaattacccagtctcggttactctgttatagcagtagaaaatgagctaaggtaacaacataggattcaaaatgatggtgatgacagtgacaataaaaatgaaaatgattatgatgatagctttgcacattgagtccttaatatgctcttaatacttgcttcacaagtgttatttagttaatcctcataacaattatgataacatagacaaggcatgataatgatgtccattttaaaggaggggaaaatgaggcacagcaatttttcattgtttaatgtagaaaaaacagtaaattaaagcattaaaacctgtaattgagccccaactctgccataaaatcctatcatctctaaagttgatctctatgagttactaaaataacacataatttttttatttatgaagtaaggtggttgaacaagattttttttttcattttatcagccattacatatttgtcttatctaatgttgaaatccagggctatatttaatataactattttctcattaaccgcaaaagtagaagcagctcaacaaataatgctgaatttctatgaactctaatttaaaagggaacaaaaatgctagtctccgtattagaagcttttatcaactacatcattaagtcctcttttctgatgttcttgaacttgtgaaattctcctacaatacctctaactctgtgaccaatgtttctttcatcatgataatatgtcttctttactaatttattactatatgtaagatccaagaaatttatgtaattttctattaaagttctgcatgctattgaaatgagttgttcatttctagatattcaataattttcatgattatttctctaatttttgcaaaaatctggtttttcacctatgaaagccaaattctggattctgtagcaatctatcatttgacaatatattagcttaaatgatgaagtgctttcttaaatgccaagtaaacagtgtcataaaaaaaactgcccgtgtcaatctgcaatagaatcttatactaagagctaaggttagttaggaagaaatccgtcctcctaaatccaaaaaagttgaacataataaagaatagatcaattactagatatatgtcaagaacatgaatccatagattgaatatttggcaatgatgtcaaaaagtccaaatcaccaaacataagaaaagactaattaaaagtttcaaatgtaaatcatatataaatgaaggagtaaaaaattatttttgtataattgttcaactgcgtattaatctaagctgtttaaaaacatatttccctatctactgttataagatatatttctaagtaataacctggattaaggaatgaacatgaaaatacctgtctttatagaatgtcctcaatatataatgactaatcttgaaaatatgatgaaagatacttcataattttagtaacaaaataaaaatagttgtaaatatctacttaaaagttaatgagattttcacatttaatatttttaattatacacgtttatcatcccctattttaaaaggacttccaagtatttgcaattaaaaatattttagtataccctatgtgccaaatattttgcttagaattgtacatgccctatctcattttacattcacagtaattccattaagtactgttataattatccccatgtaacacatgaggaaaataacgttgaaagattacacaatttgccacacagttagtagcagaggtgaaatttgccaccagaattcgaacgttaaatcacttaacaatgcttttaatttcaagacagaagtcagtctttgacaagctgattttacctgttctctgaaattgtttatatgctttagtttctgcaagccacataagacttcatttatttagccattcattcactgtcaagaaatattaagccaaactatatgtttgagtatcatgttaagcacgggacaaagtgtcatgctcattatttcccagaacatcccacgttcattctacttttacactttatttttatcccacgtcttttgcctgaaatgtttccacccacttagcaccattttaaggtccgtccacatgacctacttaaaatgttatttcccttagagaataagtcttcctttgaatgccaatagcccttattatacttaccacatatttggaaattaaataaaactaaccacttttattatttatacttttacaagaataataagcccttgagagaagggttatcctaaagtcccatccctggcactcttccctgccaacagaaagcactccaaaaatatatatagatgataagataatgatgtagtagtttatttaaaccagttttttaaaattgatataaactttagaggcaagataaaaaatgaaaaacatcttaaaagtatcaaaaggaataacaagatactaaatattaagctaaaatgtgaccatgtatagtggtctacacctataatcctagtgctttgggaagccaaggtgagagaatcacctgagaccagaagttcaagaccagcctggtcaatatagcaagaccccatctctaaaataataataataataataataataataataataataataataataataaattagcctggcctggtggcacacgctgtaaaaataaaattacaaaaagaaaatattaacttaaaatgagcaaccatagaagtaaccagggtataaaccctcagctggtgataaactcagttggttttagtggtctcatagggtgagaggaaaagaagctaaagtctgggcttacccaaaacgctgaaatttaataaggcactccaatattaagcaaggataccaaaataatatgctaccaagataaagatgaaataaaagtaaacacccctacccccaaggacctgaaaataagtttttttctaacagaataagcagagaaaagaaaaaggaagcagtcctcagagattataaatctgaagccacaagccaacctcttgggcacttatgtctcaaacttacatcacatgggtgatgaagaaaacaaaataaatttttaaaaaaagaaataatgagaaaaacttaaattgagaatttggtttttagctttccagagtggttgtgtcttgatatacctgtcagaaacagatacacatcttctctagaggatacatttttaccttgagactcaaactcctcattaatagaatttcaaagccaatgaacaacacagagctaaactaagtacacccacacatgcacacaccccaccaccaccactaccatgagcataaacctgcagaaacaacagacacccacataaatctataaaaatactgatataagcttatcagacacagatgttttcaatgtttaaagaaattaaaaacaagcttgaaaatatctgcagaatacagaaaactatgagaagtttggcaaaaaatcaaatacatattttggaattaaaaactatataaccaacaaaattcaaactcaatgtatagttttaaccatcaagtcctcacaagaaaggttaatgggaaacatgcaaaatgatagattagaagtatgtgaaattcatgtgtacttgaggctgagcaatgctgccacagagcataggaaaactcttgctatggttttttgctatttttatatggtataataatatggctatttatttattgtttgtaaacacttatttttcaaaaaaaaattcaacagtaatagcttcagaattctcacttttaatgtataataaagtatttttcaaggaagttgataataaataggttacttgcacaaagtgtatgttaatattttccacataacatgaaaccatagtgacatcagtgacatgaaattattagaatcatcttcaaaagttactagccagtcacatcaggaagatggaagaattagaagttccaaccctcatgccccacaaagaaaagccaattttggcaataactcagataagaatacttctgtgagagccccaaagtctaaatgaaagttccagaactccagtggagcacaaaacctgagtgaacccaatcagaagggtaaaaagaacagtttcacttcactcacataacctctctccaaatgtagcacagcttggtgataagagacgcaccctcagcccacaatttctccaacatggaaaagtgagagagaagtacgtgcccagtttccccaaccttgggaatgctgtccaccaaaacactgagggaagtggaacaactgaatggcctggggggagttagaaggagagagaaagggtaggaaatcatagcaaatgaaatgctaatttcaatagctagccacagatcatgctaacccacataaggacaccaccaagaggtctgttcatgaaccccacacaacaattagcctatgaacttatccaacaagccaacatatacatccagcactccttgtgtacccctctggaagatgtcatgcaatacatccccattcatggtacctgcatgttcccacatgtgtgatagcatatgatcacaatagcaagtacagatcttagtagttggctcaagtggtagattagaaaatggtgtacaaccttgaacagttcagtgcatgggcctagggaaaataaatcagagactctcagaaccaggcctgactttgcaagattgagagaaggtacatgacacaaaaatttcctccacaagaagaataagagaagtggagcagaagtggatgtatctgcacagaaggtctgagagatcccagaatcttttatccatctcctagcaaaggtctttcactccagaaaccattcagtaaagactggaggagattactacttcttccaatgtgaagacagtaatgcatgccttcaagaaactagaggaagcaaggaaattaaacactacccaagggaaaaaatgaagtttgaatgactagctccaaagaaatggagatatataaattgcctgaaaaagaaatcaaagtaactgtcagtgaagctcaacaagctacaaaagaacaaagacaataaacaatgtcaggaaaacaatatatgaacaaaatgataagttcaacagaaatagtaatcataaaaaaagaatcaaatagaaattatggagctgaagaatccaatgtccaaagtgaaaaatacaatagagagcttcaacagaagacttgatcaagcaaaaaaaaaaaaaaaaaaaaagagtaagcaaactcagagacagatcatttgaaattatccaatcagaggaacaataacatcagaaagagtgaagaaagaaaacagggcttaagagacaccatctagaaaatgaatatatgcattatgaaggctacagaaggagaaaggcagagaaaacttattttatgttaaaaataattacgtaaaatttctcaaatctgtatagggaaatgagctttcagattcataaagactaaagagtcttaaatatgtttaatataagggggtctccattgggacacattataatcacattgtaaaaagtcaaagacagagaattttgaaaacaataagaaaaaagtgatttttcatatacaaggcaactactataagtctataagcatatttcttagcagaaactttacagaccaggagagagtgagatgataaatatttaaagtgcttaaagaaaacaaaatcactgagaatacaatgtctagaagaaagtctttacctatcaattattactttaaatatgactggattaagttcatgaatcaaatacctatagtggctgaatggactttaataaaacatgatctaactacataccacttctaagaaactcccctttagcttgaaggacacacgtaagctgaaaataaaggacaaatgggttctttattacaaaattaaatggtaaaattataaatatcttgaaaaaaacaaaaatggaaatgcaacataacaaaactaatgagatgcagcaaaagcagctctaaaagggatttttttaaattaatttttcttttttcacttttgtgggtccatgttaggtgtatatatttatgagtcatgttagatattttgatacaggtatgcaatgtgtaacaataacattagggtaaatagagtatccaccacctcaaacatttatcctttgtgtttcaaacaattatattatacacttagttgtttttaaataaacaattaaattattttgctgtagtctttctgttgtgctaggaaataccagttcttacttattctttctaactatttttgtacctattaaccatccaccttcctccataccatccccacttccaactatccttcccagcctctagtaaccatctttctagtctctaactccatgagttcaattgttttaatttttagctcccagaaataagtgagaacatgcaatgtttctctttctgtgcgtggttaatttcatttaacataatgacctccagttccatccataataacataataatgtaataacgcaataatgcaaatgattggatgtcacttttaatggctgaataatattccactgtgtatgtgtaccacattttctttatctgttgatggacacttaggctgcttccaaatcttggctgttgtaaatagtgcttcaataaacctgggaaggtgggtatcagttcaatatactgtttttctttattttgggtatagacctatgagcagaattgctagttcacatggtagccctatttttattattttgaggaaccctccatactgttctccatagcggttgtactaatttacatttccaccaacaatgtatgatggttcttttttcttcacattcctgtcaacattagttattgcctgtcttctggatataagccattttaagtggggtgagaagatattgcattttaggtctgatttgcatttctcttatgatcagtgattttgagcaccttttcttttacctgtttgccatttgtatgtcttcttttgagaaatgtctattcaaattacttgcccattttttaatcagattattaaatttttttccctatacagttgtttgagctccttatagattctggttattaatcccttgtcagatgggtagtttataaatattttctctaattctatgggttttctcttcactttgctggttatttcctttgctatgcagaagcgttttagcttgatataatcgcatttgtctatttttactttgcttgcctatgcctgtgtggtattgctcaagatgtctttgtccactccaatgtcttgaagagtttccccagtgttttcttgtagtagtttcatagttcgtggacttagattaagtgtttaactaattttgatttgatttttctatatggcaagagataggggtctaggtttattcttccactatggatattcagttttctcagtactatttattgaagagacttcttttcccaaagtatgctcctggaacatttgtcaaaaaagagttcagggtagatgtatgtatttatttctgggttctccattctgttccattggtcaatgtgtctctttttatgccagtagcatgctgctttggttactataactctgtagtataacatggagtcaggttatgtgattcttccagttttattctttttgctcagcatagctttggctattctgggtcttttgtggctccataaacattttaggattgctttatctgtttctgtgaagaaaatccttggtatattgacataaattgcattaagtttacaaattgctttgtgtagtatggatactttaacaatactaattcatccaatccatgaacatggaagctctttccatttttcttgtgtcctatttactttcttgcattaatattttaaacttgttatcgtagaggtctttcgcttcagataaatccaacttggttatgattatgatctttttaatggattattgatcataaagctgttagaactcacaaacaagttcaataaagttgcaggatacaaaatccacatacaaaattcagttacatttctatacactaacaacacacactatactttaataaattaagaatatagtcccatttaaaatgggggcagggaatagccaaacaaaaggcagcagaaaactctgcagacttaaatgtccctgtctgccagctttgaagagagtagtggttctcctagcatgcagctggagatctgagaacggacagactgcttcctcaagtgagtccctgaccctcgagtagcctaactgggaggcacccctcagtgggggcagactgacactcacatggctgggtactcctctgagacaaaactttcagaggaatgatcaggcagcaacatttgctgttcaccaatatctgctgatctgcagcctccactgctgatacccaggcaaacagggtctggagtagacctccagcaaactccaacagacctgcagctgagggtcctgactgttagaaggaaaactaatgaacagaaaggacatccacaccaaaaccccatctgcacatcaccatcttcaaagaccaaaggtagataaaaccacaaagatgggggaaagacagagcagaaaaattggaaactctaaaaatcagagcacctctcctcctccaaaggaatgcagctcctcaccagcaatggaacaaaactggatggagaatgactttgacgagttgagagaagaaggcttcagacgaccaaaccactctgagctaaaggaggaagttcgaacccatggcaaagaagttaaaaactttgaaaaaaaattagaagaatagctaactagaataaccaatgcagagaagtccttaaaggacctgatggagctgaaaaccatggcatgagaaatacgtgacaaatgcacatgcctcagtagatgattcaatcaactggaggaaagggtatcagtgatggaagatcaaatgaatgaaatgaagcgagaagagaagtttagagaaaaaagaataaaaagaaatgaacaaagcctccaagaaatatgggactatgtgaaaagaccaaatctacatctgaatagtgtacctgaaagtgacaaggagaatggaaccaagttggaaaacactctgcaggatattatgcaggagcactttcccaatctagcaaggcaagccagcattcaaattcaggaaatacagagaatgccacaaagatactccttgagaagagcaactccaagacacacaattgtcagattcaccaaagttcaaatgagggaaaaaatgttaggggcagccagagagaaaggtcgggttagccacaaagggaagcccatcagactaacagctgatctctcagcagaaactctacaagccagaagagaatgggggccaatattcaacattcttaaaggaaagaatttacaaccgagaatttcatatccagccaaactaagcttcataagtgaaggagaaataaaatcctttacagacaagcaaatgctgacatattttgtcaccaccaggcctgccctaaaagagctcctgaaggaagcgctaaacatggaaaggaacaaccagtaccagccactgcaaaaacatgacaaattgtaaaggccatcgagtctacgaaggagctgcatcaactaacgagaaaaataaccagctaacatcataatgacatgatcaaattcacacataacaatattgaccttaaatgtaaatgggctaaatgctccatttaaaagacacagactggcaaattggataaagagtcaagacccatcagtgtgctgtattcaggagacccatctcacgtgcagagacacacataggctcaaaataaaggaatggaggaagatctaccaagcaaatggaaaacaaaaaaatgcaggggttgcaatcctagtctctgataaaacagactttaaaccaacaaagatcaaaagagacaaagaaggccattacataatggtaaagggatcaattcaacaagaagagctaactatcctaaatatgtatgcatccaatacaggagcacccagattcataaagcaagtccttagagacctacaaagagacttagactcccacacaataataatgggagactttaacaccccactgtcaacatcagacagatcaacgagacagaaagttaacaaggacatccaggaactgaactcagctctgcaccacttggacctaatagacatctacagaattctccaccccaaatcaacagaatatacattcttctcagcaccacaccacacctgttccaaaactgaccacatagttggaagtaaagcactcctcagcaaaggtaaaataaaagaaattataacaaactgtctctcagaccacagtgcaatcaaactagaactcagtattaagaaactcactcaaaaccactcaactacatggaaactgaacaacctgctcctgaatgactactgggtacataacaaaatgaaggcagaaataaagatgttctttgaaaccaacgagaacaaagacacaacataccagaatctctgggacacattcaaagcaatgtttagagggaaatttatagcactaaatgtgcacaaaagaaagcaggaaagataaaaaattgacaccctaacatcacaattagaagaactagagaagcaagagcaaacacattcaaaagctagcagaaggcaagaaataactaagatcagagcagaactaaaggaaataaagacacaaaaaacccttcaaaaaatcaatgaatccaggagctggttttttgaaaagaccaacaaaattgatagaccgctagcaacactaataaagaagaaaagagagaagaatcaaatagattcagtaaaaaatgataaaggggatatcaccactgatcccacagaaatacaaactaccatcagagaatactataaacacctctatgcaaataaactagaaaatctagaagaaatggataaattcctggacacatacatcctcccaagactaaactaggaagaagttgaatctctgaatagaccaataacaggctctgaaactgaggcaataattaataaaccaaaaaaagtccaggaccagatggattcacagctgaattctaccagaggtacaaggaggagctggtaccattccttctgaaattattccaagcagtagaaaaagagggaatcctccctaactcattttatgaggccagcatcatcctgatagcaaatcctgggagagacacaacaaaaaaagggaactttagaccaatatccctgatgaacatcaatgcaaaaatcttcaataaaatactggcaaacggaatccagcagcacatcaagaatcttatccaccatggtcaagtgggcttcatccctgagatgcaaggctggttcaacatacgaaaatcaataaatgtaatccagtgtataaacagaaccaacgacaaaaaccacatgattatctcaatagatgcagaacaggcctttaacaaaattcaacaacgcttcatgctaaaaactctcaaaaaattaggtattgatgggacgtacctcaaaataataagagttatctatgacaaacccacagccaatatcatactgaatgggcaaaaactggaagcattccctttgaaaactggcacaagacagggatgccttctctcaccactcctattcaacataatgttggaagttctggccagggcaattaggcaggagaaggaaatacagggtattcaattaggaaaagaggaagtcaaattgtccctgtttgcagatgacattattgtatatatagaaaaccccatcatctcagcccaaaatctctttaagctgatatgcaacgtcagcaaagtctcagaatacaaaatcaatgtgcaaaaatcacaagcattcttgtacaccaataacagacaaacagagagccaaatcatgagtgaactcccattcacaattgcttcaaggagaataaaatacctaggcatccgacttacaatggacatgaaggacctcttcaaggagaactacaaaccactgctcaatgaaataaaagaggatacaaacaaatggaagaacattccatgctcatgggtaggaagaatcaatatcgtgaaaatggccatactgcccaaggtgatttatagattcaatgccatccccatcaagctaccaatgacttacttcacagaattggaaaaaactactttaaagttcatatggaaccaaaaaggagcccacattgccaagtcaatcctaagccaaaagaacaaagctggaggcatcacgctacctgacttcaaactatactacaaggctacagtaaccaagacagcatggtactggtaccaaaacagagatatagaccaatggaacagaacagagccctctgaaataataacacacatctacaatcaactgatctttgacaaacctgaaaaaaacaagcaatggggagaggattccctattttataaatggtgctggaaaaactggctagccatatgtagaaagctgaaactggatcccttccttacaccttatacaaaaattacttcaagatggattaaagacttaaatgttagaccgaaaaccataaaaaccctagaagaaaacctaggcaataccactcaggacttagacatgggcaaggacttcatgtctaaaacaccaaaagcaatggcaacaaaagccaaaattgacaacttggatctaattaaactaaagagcttctgcacagcaaaagaaagtaccatcagaatgaacaggcaacctacagaatgggagaaaatttttgaaatctactcatctgacaaagggctaatatccataatctacaatgaactcaaacaaatttacaagaaaaaaacaaaccaccatcaaaaaacgccaccatcaaaaagtgggcgaaggatatgaaaagacacttctcaaaagaagacatttacgcagccaacagacacgtgaaaaaatgctcatcatcactggccatcagagaaatgcaaatcaaaaccacaatgagataccatctcacaccagttagaatggcagtcattaaaaagtcaggaaacaacaggtgctggagaggataaggagatatagggacacttttacactgttggtgggactgtaaactagtccaaccattgtggaagtcagtgtggtgattcctcagggatctagaactggaaataccatttgacccagccatcccattactgagtatatacccaaaggattataaaacatgctactacaaagacacatgtacacgtatgtttattgcggcactattcacaacagcaaagacttggaaccaacccaaaagtccagcaaggatagactggattaagaaaatgtggcacatatacaccatggaatactatgcagccataaaaaatgatgagttcatgtcctttgtagggacatggatgaagctggaaaccatcattctgagcaaactatcgcaaggacaaaaaaacaaacaccgcatgttctcactcataggtgggaattgaacaatgagaacacatggacacaggaaggggaacatcacacaccggggactgttgtggggtgggaggaggggggagggatagcattaggagatatacctaatgttaaatgaagagctaatgggtgcagcactccaatatggcacatgtatacatatgtaacaaacctgcatgttgtgcacatgtactctaaaacttaaagtataattaaaaaaaagaaagaaaatacagctgtaagaaagaccataacaaaataaaaaaataaaataaaaaataaaatgcattgaaaagaaaaaaagcttacgtataaatttaactaagaaggtgaatgatctgtatactaaaactacaaaacaataataaaaaattacattggacacagtaagtggaaagatgttccatgttcacagattagaagaattaatattgttaaaatgtccatactacccaaagcaatctacagattaaatgtaatccttatcaaaaattccaagggtatttttcatagaaaaaaaaatcctaaaattaatatgtaactacaaaagacccttaacacccaaatgaatcttgagcaagtgtacaagaaagctgaagacatcacacttcctgatttcaaattatgttactaacctctagtaatcaaaatagtatggtactggcataaaagagacatagaccaatggaacagaatacataacccagatataaacccatgcatatatggtcaattaattttcaacaagggatccaaagatatacaatgaggaaaggacagtttcttcaataaatggtgttggaaaaactagatatccgtatgcaaaataatataattgggtgtttgttttacaccatacaggagaaccaactcaaaatggattaatgacttaaatgtaagacctgaaacaataaaactcctggaagaaaacagaaaaaaagctcactgacattgatcttggcaataatattttggatatcacactaaaatctcaggcaacaaaagcaataatatataagtgggagttatgtaaaactaaaaagcttctacatagcaaaggaaacaatcaacaaaacaaaaaggcaactgctatgcttttaatgtgtttcccaaattttataagcaagaaacttaatccacgatatggcagtattgaaaagtggggcctgtaaaagttaacaggattatgagggctcataaatgaattaatccatttatggattagtggtttaatggattaatcggttatgggaatggaactggtgattttataagagaaggagagagctaagcaagtatgatccgtcccctcactaccatgtgatgcctttcactgcctcaggactctgcagagagtccccaccagcaagacgttctcaccagatatacctctctaccttgtacatctcagcctccataaccctaagaaataaatttcttttcttaatagatcagacagtttcaggtattctgttataagcaacagaaaatagcaacctatgaaatgggctaatatccaaaatatacaaggatctcatacaactcaacagcaaaacaaaacacaaaaacaaagaaaaagaaaactaaaaaaaaaaaactaattacaaaatgggtgaaggaaatgaatagacatttctccaaagaagatatacaaacagctgacaaatttgtgaaaaggtgctcaacattactagtcatcagggaaattcaaatcaaaaccacaatgaattagcaccacagctattaggatggctatcctaaaatgtttttgtcatccacagacaattgttatcttgttttagtcctctttaaaagatgtttttataaccagctacaaaatttaacaggtgttcttaaatgcaggattgtgattaataactctggagattgtgacattagaatagacgaaaaactgggaggccgaggtgggcggatcacgaggtcaggagatcgagaccatcctggctaacacggtgaaaccccctctctactaaaaatacaaaaaattagctgggcgtggtggcggacgcctatagtcccagctactcgggaggctgaggcaggagaatggcctgaacccaggaggtggagcttgcagtgaaccgagatagcgccactgcactccagcgtgggtgacagagcgagactccgtctcaaaaaaaaaaaaaaaagagtagaggaaaaactttcaaatagaagaattaatggtgtttggttttctttggactgcattttgtataaatacgttattagtacgtgttccaaaaattatgggaaacttctataattctgacatgatttagtgtacattactaataattagcattgtcatgtaaaattgttgtatgccacagaagtaaccaaaattcctagtcagttgtagctttaatagtggctatcctaattattttgtcatccacaaacattttgtcttgcttagctccttttcaaaaggcagtttataatcagatataggactctgagtgcaggtccctgatactttaaaaattgtgatattcaaatagaggaaaaacaaacttctaggattctcacagaaaactaatgtgttaaacaccgctaaacctcttgttttcaaagtcaagataacctatttttttagagctattggcaacttttaacaagtgagtaaaataatatactcctgtgaacaaaatgtatagcatatatgtttctctctacctgatttctccagaatttgggaactatgtctgagtattctcaatttacagtagtatagttaattgtgtaagtgcaataagaatctgttttcttttgtaataagacccaattggagaaattggtcattttaccaagactgactggaatggcatgctccctttaaagaatcaaagatcaaacttgacttatagagccaattaaagcccgttcgggaatctggcctcatactttgtgcacagagtccctgtacaaggtttctgacctgtgctaagtaaagaatgtcactttctaacaggcccgggaacccctagttatcttggacctcaagagaagaggaatttgctcaactcaaagatatttgagggtacagacccatggctggacttggcttttaaaaattcttatctgagatgtttcatagaatagagttccatcaaagccaattaaagcctacatgaaaaataattattcttgctgcactttatgcaaataatcaggccaagtacagtaagactaaagttttattttgtaaactgtaaatcagttctatcattatttgttttttttttaaaaatggagactggagagagaaaaattatgcctcaaaagaaaaactatagtacactgttgttagctgttcttgaagttttttcctgccatttagactaaattctaaattctttgtaggctagaagtctccaaactaatgctttcaaatctttgcttttaaaattgggaattgtactcctcatcctaggactcattatttaccttatagtatacagttcacttaaatactgtcctaaaactgtagatggaagtaataatgtttttaccatgctagccttgaaagcccagccatgcctgcatgagtatgctcaggcaattgcaaagtagttccattcttctcaccttgtggccagagcgattgatggccttttcccatcttcatagcatacaccttaagattaaattgttatacaacccaaagggagggattgaaaccataattttgcaaaattatgactgaaacagtgaaacagagctaacttaaccaactccatcttgcttctaatctccaagctgtcttgttcattcctgggcataggctgaactaagtttgggagaaagtttatagtttaaacaaagagagtaacaacgctttcccaaagcacacctccttcctgcctggggactagatagcctttgtaggactaacattagtgacagtattagaaattatggtttaggagtcatgcagctggaatctacaagattctgaccgtccctatactgctcctaagaccaatgcttgagatattttgtagaccctgcatgtgatagatcagctggcaccacccagatcaataaactaactcatctaatcttgtggcccccacccaggaactgactcagtgcaagaagactgcttctactccctatgatttcatctctgaccaatcagcaccctggctcaccagcttcccctcacccaccaagttatccttaaaaactctgctcccctaatgattggggagactaatttgagtaataataaaactccagtctcccacattaaaaaaaaaatccaatgtcttttttcacagtaatggaaaaaacaatccttaaactcttatagaaccacaaaagaccctaaagagtcacaataatcttgagcaaaaagaacaaagctggaggcatcacactgtctgattttaaaatatattataaagcaattgtaataaaatagcatgctactggcataaaaacagacacatcaaccagtggaacaggatagaagcccagaaataattacacttatttacaatcaacaaatttttaataaaggtacccagaacaggcaatgaagaaagaacaatctcctcaataagtggtgctggaaaactgcatatctatatgcagaagaataaaactggaacctaatataataccatatgcaaaaaacaactcaaaatagattaaagacttttaaatttaagaactgaaactgtaaaactactagtaaacatagcgaaatctctatgacattggtttgggcaatggctttttagatatgaccccaaaagacaggtaacaaaagcaaaaatagacaagtgggatggcatcaagctgaaaagttcctgcgcaacaaaagaaacaacccacagaatgggaggaaatataaatatttgcaaaccatacatctaataagttaatatccaaaatatataaggaactcaaacaactcaatagcaaagcaacaacaacaaatagcccaattaaaaaatgggcaaaggacctgaacagatatttctcaaaaggaaacatacaaatggccaataggtacatttttaaaatgcttagcattattagggaaatacaaattaaaaccactatgagatatcacctcacacttgttgactctttataaaaattatgagagataaaaagtgttggagaggatatgaagaaaagggaactcaaatattgttggtggaaatgtaaaaccctgcagccattatggaaaatgttatggaagttcttttaaaaactaaaagtagaaccactatacaatccagtaatcctacttctgagcatatattcaaaaacactgaaatccatcggtcaaaaggatatctgcactcccatgttcattgcagcattattcacaagggccaagatataaaaacaacctgaatgtccctcagtggataaatggattaaaaaaaaatgtggtacgcatacacgatagaatactatttagccttgaaaaagagagaagtcctgtcatttgtgacaacgtgaatgaatctgaaggacattatgctaagtaatataagccagatgcagaaagacaaaaatagcacatgatctcaattatgtggaatctaataaattagaactcataaaagtagagaatataatgatggctaccagaggctgggtaataaagggacagtaggaatgggaagttgctgttgatcaaagaatgtaaagtttcagacagagaagagaaagaagatttgagatctactgcacagtaaggtgactatagtcaataacaacgtattatatgtttcaaaataactgagtaaattttgaatgtctcactataaaaactgataggtaaacagggtgatgaatttttttttttttttttttgagacggagtctcgctctgtcgcccaggttggagtgcagtggtgcaatcttggctcactgcaagctccgcctcccaggttcaagccattctcctgcctcagcctcccgagtagctgggactacaggcgcccgccaccacacctggctaattttttagtagagacggagtttcactgtgttagccaagatggtctcaacctcctgacctcgtgatcggccttcctcggcctcccaaagtgctgggataacaggcgtgagccaccgcgcctggctgtgatgaatatgttaattagcttaatttaattatgccagaatgtatacatatatcaaaacaccaatttgcataaatgtatgcaattgtaatttgacaatcacaaatactaataatatatatttttaaagattcatattgttatgccctaaaaaatcactaaaaataatttaattacagtagtcccccattatcagcaggagatacataccaagacctcctgtggctatctgaaaccccagatagtaccaaatcctgtatatactatgtgttcttccatctgataactgataacagcaactaagtgactaacaggtgggtagatatatagtgtgaatatgctggacaaagggatgatttacatactgggcagtaagagctggacaatgtgagatttcatcacgccacctagaatggtgcacaatttaaaattaattatcaatgtctggaattttccatttaatatttccagatcatggttgaccacaggtaactgaaaccacagaaagtggaatcatggataaggttgtactagtgtaataagaggtctaaatcataaccaatagtcatgttaaacggaatcataatgaaaattcaaaagcaggcagaaaagaaaaaaaaaacaggtggaacaaatagaaaacaactagcaggctgggcagattataaccagacctcataaaagtggttacattaaaggtaaatggtctaaaaatactaagtaaaatacagagatggtcaaattaaataataaaacaagagccaaatatatgctgtataccacaaactctatatataaaaacatggaaaggttaaaagaaaactgatgtagaaaatacaccatgcaagcccacctccaaagaaagctggaggggttatattaatatcaaagtagccttcaaaaacagaaatattatttggaatgaagagaaaattaataatggtaaaggataaccaagatgacataaaaatcctagatgtgtacctaggaaaagagttccaaaaaacaagaagcagaaactgatacaactaaaaggaaaaatacgcaagtccacaactattgattaaaatttcaacacaaccttttcagtaattgaatgaacaaatatacagaaaatcattacgtgtcaagacttcaataacaatatcatctgacttaaccaacgagcagccgattaaacattcttctcaagtagacattcagcaagatagacaacagttgtgccatgaaacaaacctcaaccaattaaaaagaaatgatatcataccaggtgttttctctgactataataaaattaaattatacatctataacggatatctgtaaaaccacaaatattcggagattaaaaaatatacttctaaatatcccatgcaaagagcaagttaaaaataaaattagaacatgttttaagttgaataaaaattaaaacccaatgtattaaaatgtataaggttctaaagaaatgcttgaagtgcaatggatggtgcaaaacacttccattagaaaaaagaaacagttttcattcagttgtctaagaacaatgaccctaacacctgttcccttttcctttccatcagagttaattatctgtaaggaagatatacacatctaaagacagattttccaaacacatgcatgtgcattttgaagccagacattataatcaattaagattcattcctagaacatctggtcaccagtcaggcattcaatttaggaactatcactttaagcattaaatgcaactactttcaataacattttgtcttcttcctttgaaagtaaaaatatctgcttcaaaactatagttttgtaattcaaaggaaagtttaccatattgtttactacttattttcttaaagctggaaacagacaaaatacaccacaggaaagcataattaatatgtgtatcataacatctaaagctacagttataaataatgtgtcttgagcttaaagtgaccaaccatcacagattgcccaaactatagggattccagagacatgggattttcaatgctgaaactgggcaattcctgagcaaagtatgacaagttggtgaccctaggcatacatgtctaatgaatcatacagatctattttaattgaacaattataaaaataaattgttaatagcaagtatcttaaaacaaaataattcaatgtttgtcttaaaacatgttaacttgatttgttacttattttcatgggatctacgtttgtgttgttaaatccacaggttgtgtcttcatggccccagtcacaggcccactgatgcttcctagcctggctctgtgcatgttttcagtttgttctctctttcttcataactaccacaacttcctctagttctcagtattactaagattgttggtgcaaatatacttgagatccccagttcaacttgcccctattttcccaaatgtgtagcaaactaactaggctagacctgccgctgactagcctttctttttctctcgtttttagatggttctcaatggatgtgtcagtgtctatgtgtgttagcatgtaagaatgtgtgaaagtatgttttgggggagtaccacaaccactaaaagcacttttacaaataacacagatttccaccctcaaaagattctagactgtttcctagagaacgggagtgggaagtagcaaagagtagtttgaatatgtctcacgaataattctgatatgtatatcccaactctccaagctctgccaacacacacacacaaacacacacacacaaacttatacactccactggaatcttgatgaaccaattatctatttcattcttggtagtagtgagctagtagagattacgctatgttaagcctataattttattatttattctttccccattaggaaacattattgtcagggatgttctatagtatacttacgttaagtattaccatacttcattcttttttctcttgtaacttcttacacagaaaagaaatctggaatggattatgtgtcagttattacatcaggcccaagagaacgtgttgctttcacatgggatgtggcaaacttcccagggcccctaaatggactacttagggaatcccaagccccaaaaaatggtccctggaagatacctggtctgttgattcacatcctggactcatttaatcattggtgtttgttcattggcttagccaagatgagagatgaggtaatgatatctgaatttatcagacaattttcctttcaatgtcatataaatttgtggaggatccaagtaagactctatgtatttatatgaggatgctctcctcactggacatgaatgtggccaccattaatactatattcttaaataaaataaagacatccttcttaggttgtttgaggcagtaatttccaacttcattgctttattttgttcgaaataaacattcttctctatttgccagcactcattattcctgaaaacaaaaatgcaaaataaaaacaaaagtggtctaggacatatcagggggagacagccagaatccctgacatctattgtttgcttcttgattggtaatcatggtgtttgcttgtaaactaaatggctaagaggactgaaaagaatctcgaaataggtttacaagtgttaccagattcaatagtatatttctgaaggtcaaggcaagccaaaggagaagaattttcttgttatcagatgcccaaatggtatcaccaacatccaaatcaccaccagcaatactggtagtagggtaacattttggaattcttagtaaagtctcattaatcagacttttctaataggaaatttgtgactatccagacagaaattgagttaaattttacttttgtactctgaacgagaattgaaaatgtaagcataaaatattaaccaatttgaaatgaatgtaaactgtttaatcactttataatagtattgacaaacacatagagatagagagcagaatagaagaacagtgttagacagagagtagaatggaacttactgggtcaaaatgagatgatgaaaagttcaggagatggatagtggtgatgcttgccaaacaatgtgaatgtacttaatgttactgaactgtctactaaaaaatggttaaaatgataaaagagaaaaaatagtactgaatgcaaacaattatttcaaatcttagttcaactcctatgttcttccaagtagaacatatatgctcttaaaaatattctctcattttgaaacattggacaattcaattctacctaccacaaacatttatttccagtaatctggaaatgttagtatacatagtgctgtgccagcctgactcagtcgttagactactggaaataaatcctcacttcactagattctagctgtgagagttagacaagtttcttagttttctcttctatgaaatgatgctggtgatggtaattaccttacaggatctttataagatttaaatgaattcatatatgtaaagcactttgaatagttcctggcatacagcaaacgttcaataaatgtcagctaatgtatattgtaatggtataacaaaaatgtgaagttttgttagtatggaaaacatgtatacatggataaagtagggatagctattttttagataatatacaagttgtgatgaaagcaaataaaatatgctgaataatttgcgaaaacattttaataaaactattccagttgtttaagtttaaaggtttatagacaacttatctttctattgtacaatgattcttcaactgaagaataatgcttatatatgtatgtcctctaagcagtagacgatgcaggataacagcctttgccacatttcatttgcagactattaatgggcaacaactttaattgttatttatttatgtttaaaatttaatgaagatatgaataatttaaaatttttgtcatattacaaaagtggaatattaaacttgcaatgtatctagccatctcattttctagaagtatatcaaatggaatttatcacaggaaagatttatttaaaatgtgaataagcatgaataatgaataataggagtagccattacctattaaaactgcaattacacaaagaaggaaatactataccagagtcattattttcctgttcataaatcttattgaagggaccacccttctatgaactgacactaactgtttactgcctattccaaaattttctcaaactgttgacaaaccaatcacaagggtgcacagcaggggatgggaccatttcttctactaatcttttagaccatttctcctacgtatcttggcagaaaacctgtaacagtttgaacagaattgtgcacaatatgtgcagctcagccaaaactcattaagtgcctttgtctcatgcatcttgtgaaacacaatattgcacccctgatgagcaatgcctccaaatgttatgttaacattaagatcaccagaaaccattaatttactagtcaaattacatctctcagcagcattcagacaatgttctggggaatgatctgcctatcaccaagtataaataaaattttaatgagtgttttccagtacttcaaacacaggttaagaaagtgctctagaatatatttcatgactcatgtgttacaggataagactttaatttaaagctaacatattccgtacattttttccaggtacaaacagtatttccaccgctctctggctttattaaaaggtggctttctttcagagaattaagggacgtcttcaatttttagctctatcttcttttcattgatgtctatttccaggtccacattttactttgcctctgttgctgcattgcattccacatctgtattttcccatgtcataggctactcctagaatgccttttcttacctcaaataaagccaactaccagttatttccctctctttctaactgctctcaaaaatacactccatcaatgaattatctctgactagctagaaggcagggtgacctcttccaattccctttgttagatattctcaaacggtccttggtaacagaaagtgcagttatcactatacctttccacatataaacatattcattatttaaacttacattttaaaattaggcttgctgtttctgtcccagattataaaccaaaagctataaggctctttgcctgacttggcatagactctacagcatcatcatataccaagaggcatttaataagtcgcatgcacattgttatctacaaaatgtggtaaacataatagccaagatggttaaatactaataagttatattcctcaacattagtcatttcttcaactaaattttctagcatccttattgtctatctttacctgggacataaccttgattgataagtgagcaatactttatcttccaatgacaaaatcaaataaactacatgacaacctgagcaataaggcaaaaattgatctttaacgttaataaaaaaaaccccaaaatcatcaaaaaatagatcaatttagccattgactgtggacaaggccatcacatataggtcaaaattcaactgcgtttgatctaacaatcaagaggtcattgttttccctttgccatttgctaaattctagcttcagtctgtctcctttacttcattttttaaagcatcttaaggcaatgataatatcacatttattgattttgaaaataattccaatttagaaaatagttataaatgacaaaattttattggttttgtttttaatagataatgggctaagatataaaaacatattttacaaatgtaaaatcctcttattttgagtaacaacacaaaacgaaatactgcttcctaatttgctgataaatatattaaaggagaaggcaaataaaatgatttgtacaagcagctgagctcatcattcaataaaatccataagaatgataggtcatgtcctataatggttatttctagagacctgaacgtggcaataatataagatcagccttattcagaattcgtggctgatgattcagaccagaaacaaatgaaagcttagaacaacttctcaaaagttagtgctcagttttgtagcaaatacattttactattttttaaaaatatttttaagcctcaataaagaaggattaaaaatatgaaagttcacaagaatgtttgctcaaaaaaataacaagttagaaaaaaacaatcaaatgaagactttggagcaaagacattaatggcatgaagcctgtgattaaatatgatgactgagggatgattctgaagcctaatcacctagcaccaaattgtacctgtcctgccttctagctgggcaattaggaaaacttccttaagctctcttgccttctttctctcattggcaaatagggataataacagtacctacctcaaacacttacgtgttaatacagacacagctcctataacagtgccaggtacataggatgtgctacatttgattttttattattatttctgataagctttcatcatatctttagtgcattttctaatggcatctgtttgttttctttcatttgaggttcttttggcttaagccaaaagataaacaactgcttttcttttttcttttgttttcctttttttctttttttttacttttttttgagacagagtctctctctgtcgcccaggctggagtgcagtggcgcgatctcggctcactgcaacctccgcctcctgggttcaagcgattcttctgcctcagcctcccaagtagctgggattataggcctgtgccgccgcgcccggcctgctgcttgtttttctatgttcctgatgggatgagacctatttcagtgaagcgttctttttaaagtagcaattgaaagtccccaacatgatgagtccaccggggtgaatagtcttcaactgaaagccagagataaaaaaagaaatttctaaatattaaaaatgccatgatgataactttgaaacttaattgcaaaagatggcgatagcaatgtctaaaatggcaattgtctgaaatgagtgccaattaaaggtcacaggaacctacaaaaaggctatgagtgctccattacacattgctaatttgagtaaatagggaaagcggcatttatatgcaaattgtgcgaagagaacatattgcaaatatatttctacagctatgttacccattttcctactgcgtgtctaatgaacaagggagttccagtctttattaatagcctgtagaattagcatttgctttacaaagaaattgtcaataaaagaaaggggagttcccagaagttacccactctacgaatcagcacacttactactaacacatggatttcaaaattgaccaacacagaatcagaaacctgtaccacagtgttttaaacacttcaggcatggaatgtaaaatgagcactagccgtgtcctaagaacaaatgtattttgagcaagaaaacatttcaaaactatctttgttgtgtcctaatgcttcaagcactttggccaaacagtcctaccatgtaagtatcccccccactgggatgcaatggttgaggaaatttcaaaatagctgtatccttttaaggaaactattcctgttgttcgctaaggcaaaagcttgcgtgtagatttgtcttcaaagatctttgtcaacaggtgttaataagtttgttaatatcacaattggctactctttatgtacattaaacactaagtattagagaatagagtgatgatatgtagaacttgctatatagaattattaattttccattttttctgagaagcctgctgccattaaggaacatcagttggcaaaaaaaaaaaaaaaaaaaatcactatcccctacagcaccacttctgcggtagctttctagaaacaccaaacgctacaagcttcttagggatgaaaacagttttttatgcaaacatagatgagggcttcacttggtgccttttcaattaacagttctcaacaaaaccatttctgtactgattatttctgactctcttctattttgaaatgatttctctgaccaaaatttatgttgaaaaaactcacaaagataaagaaaatgttacctgtttccataacacaatttttaatagcattttcctctaagataggccaattgtttttttcttatagaatgtatttctcatgaaaaactattttagacatgagaaggtattatttttcaaatgaatcatgacagaatttttgtgaagatgctacattacccatacgaggaacactgtttcacattttccaggtattttggaatcctaccttgaggagaaattcaacagaagacactgtggtcaggacctctctagctaaatgaaaaattgacataattttcttctacagacagccttaaaaaaatatttattcaattctccagataatttagataaaaatgatgtttggagtttgatttgactaaaaatatcacctttccttcagctatttgactatatggacatgacctcagatgaacacagcagaaatgtggagtttaggtcaatgaaaagaaattaatttataaaatctagtgtttccaattctagtgatggcttaggaaacttcactttctctgttgataagaaaaataattattagtgatagattaataaaataactttaaaaccatgtatttgacagtttaagtaaagtttatgctgtataagttcaaattttactgcctttttaataatgtgtaaatcatgttgacacttgtaagaaaaatgtccatattattttaagtccaaattttactgctttatcatttctattacgtattttggaaatggaaatcttttgaccttaaaataatcaagtaataaaataaagtagtaaaagaaattgaaaagccgtgcatctgactctttatttcaaaccattaagatggaagtaagaaaaaaattgatgacttctattcataaccaattgaaaaaggaaggaaatctctctttagcctgaaagtgtatatctagatgagaatgaccaaaaatggataagctctggttggtcaatataatgagtagttactgatgtactgatatttttaatagcttagcctagatggtattacttttgtaagttatatgtaagaaattatttggctattcactaaacttattttccaaaaagtgctttctatttcagaagcactatgttacaaatactgtatcataaagaaaaataagaaaggataatgtcctctacctttgaaatctcagtaacattttaatgttaacaatggtctgcttctttttatatcaatgctaacataatactgaacagtcttgcttgaaaaaaattcaaaaagaagataatgaaatatcccagaaatttgtcacattgtagaaagaaagccgcaataaaaaatgtgagatccctttacacaacatatttcttagcatttgatcagaaagctttgttattggcactcacgtaatatttcaatataattaccatgttgtctgctaatcattactcactaactaaaattactaaacacaaaaactatgcttattcctatgaaaatattcagttaaggagtttcaaagcataaaatctttatttttaatattacctattacatattaaatcaaatgaattagaatactaatcctgagaagtaactgcttacaatataaaaatagtatatctaaatctattactgacctacgattattcttcagtccagttccctgtacaaatccaatctgtgtccaagcttatttaaagatgtcaatctcatcagaatttaaatatgacacagcattataaaacatatctggttactcaagatttctactagcaaacatggctttaagcagaccccaaaggcaaaccctgccagaggggggattctgtatgcctatccttttccaaattcatctcactagagtgaccgagccaccaaagacaggccacatccctgaaatattgcttagcccttgtgttgaactatcgggcattttgataccttttcagagttgcagtccacatttccccagtattggtttccattttcacgactattacaggctattctttgaaaattgtgtttataagggaaaatataaagttctcatccattgaacagaccaaactcctaagctcaatatatttttatcttctatgtatttatggtccatggctgcccttcagttaaagaataaaaaactcaagtgagataaagcatcaaaatatatattatagttccatttaggttttagcttagaaggccaaggacattgccacttagggagaatctctgcctctcaacaaatcaaagtgtatttgctttgattagtttcttaactgaaatgaaaaggtaatttggatcatttgttgaacataccaaacccactggtaaattcagccaatcagctataaggagtaaaacaggcagttaatataatttgtattaatcataaccactgcaattatgtaaatgtagcttgaaatgttatgtgttaatttagtatgctactgttgcttctagagaacctacgaatttctaaactcaaaggcacctccagaattcctgaaaggtgttgacactgtcatcagttatgttcccagatgacttgggtattacgggctaaaagctacattttgtcacatctcacaaatatatctgtggtttgactccaacctagtactctggttaagcacaattaaataaacaagcataatttatcccttatattacattaagagttagtgaacagaggttattcatttacatctaggggccggagaaaaaagaagcactcaattgtcttttagaatgtttagccctgaaatctatttttgtacatgagtcttagatgccttctggataagggctcagatcattacaccaaaatgcattagtctatggcaaaaaaaaaaaaaagagtttgattatgtgaatgaaactaaacaaaaatcctgggtccagaggaatgccttaaaactaggataagaaaattgtgttctcacatactataaaaatacaacttcagggacatctatctctggttttggttttgtaattttaagttttagtcaaaaattattgctcagtcatgtcttttttctcttcctattccagagatatatctcatgtgatgtaacaagacgaaggctgttaaggcagctgctcaaaataaaaagtctctaaaaagcaatagcttcagctgtatcaagtcttccctgtggagccatattcaggcacatgagccaaacacatatcatgcgtcttcttcctcttgtacaaactgaaaaaccaaaacactaggggaaagagaagacagtaaaatcaacattaggcttgtcaaggcaacttaattatttcgccacaaattattgaattttatgtcatggactcacccaaaattatgtattcttataaagtaagcatctttgataatagatattgctatttaacttatgccttatcttcaatttagaaactgcagtgttttaatgtcccacattttagataataaatggagtcccccatgtatagcagcatgatttatagtcctttgggtatatacccagtaatgggatggctgggtcaaatggtatttctagttctagatccctgaggaatcgccacactgacttccacaatggttgaactagtttacagtcccaccaacagtgtaaaagtgttactatttctccacatcctctccagcacctgttgtttcctgactttttaatgattgccattctaactggtgtgagatgatatctcatagtggttttgatttgcatttctctgatggccagtgatgatgagcattttttcatgtattttttggctgcatatacccaaaggattataaatcatgctgctataaagacacatgcacacgtatgtttattgcggcattattcacaatagcaaagacttggaaccaacccaagtgtccaacaatgatagactggattaagaaaatgtggcacatatacaccatggaatactatgcagccataaaaaatgatgagttcatgtcctttgtagggacatggatgaaattggaaaccatcattctcagtaacctatcgcaagaacaaaaaaccaaacaccgcatattctcactcataggtgggaattgaacaatgagatcacatggacacaggaaggggaatatcacactctgggaactgtggtggggtggggggaggggggagggatagcattgggagatatacctaatgctagatgacgagttagtgggtgcagcgcaccagcatggcacatgtatacatatgtaactaacctgcacaatgtgcacatgtaccctaaaacttaaagtataattaaaaaaaaaataaaaataaaagaaaaataaacaagaaaaaaaaaaaagcatcagaaataaaacttgcctgcttttccaatcagaggcaactcaactgtgtagtcatctaggaaaccaccagggacttcacagatgaagtttcagatgatacagccaatttcagtttcacctaacagaagcaagaataaaatttaactttcccagcgtttgattaaatgagtattttgattcattctattagaattctacataactggtaatataagtgtgccacccaagcaatagcgttatgaaatcaagaaatgacttttgctgggagcttaactctagaaccatctttgtttcaaatgtatgacattagagaaaaatgattagcctcagaccaaataaattgtatatttagtcatattcaccacggctatgaatttcagttcagaattctgtcattttatttcactcaccaaattccttaagactgaatatatgccatagtatcatatgcataaatgatggtaaatggcttagaaaaaaacagaaagtggaaacactcatattctttcacccaatgatgtacagttcctgagaaaatgtctgaagaaactaataaacaacagcatcaaaataaacatatgtataaacatgctccatacattactaataattttaagagaaaaataattctacatgtttgctaaattatgttatattcattatgtgccatattacataactgttaaaactatggaaaggtgtatattgttatatgaaataaggaaaagacaatatttgaagttgctgttttagtttgctcacttctcagtgctatctgttctctctcattcctcttgtgaattgctaatactctgatcaccaataatctcttaattgttcaattctgtgccactgtcaagttgttattttgggtgacttcaacaaaagacaaaataaactccaccatttctgccaccaccctcccttccctcatttcctaccactcctctccctctcccccacccaccccaaaatcacatatactttgctcctttatttgtgttcttgagtcagaaatttggagatgttctcctaccctctaaaattatctcctaaatatctgtttaaatcctgagttcgtctctatctcctgcaccaggttgtcttagttcaggccctcataatctcttccttaaactactgcaactgccaccctcctcatctgcttccagttcctccccagcctaattcatcctccaccttcctaccatgtgcttttcaaaaatctatttctgatcatgtcactttctctttaaaatcattgactccttcaaagtaagagatgctcaaatagtttgtatagcatgcgagaactttctcgcacccctccttttctcaatcgcctcatttctcattgttatgtaccataccccgtactctttctcacatggaactactcgcatcttccctagattccacgacctatcagaagccctgtctggtctgtttttcacctcatttgccccatggactctcctgtgttcccctttataaatttgaaagcactctttacattattctaagttaatggtttatgtatggatctttttcactgcctataacctgtggtcaggcatatttattttgtaataccaactatattatagcacctggtactgagtagaaacttaatatttcttgaatgaatgaacaagcaaataaataaaggacctgcaactatgcaaaatatgcatagattaaaagtaaatgtgggaaagtaaaaacagctaagttctaataagtaaataaaaacttttttctgtttttagttaatttttgagcaaactactattcaaaataaaatatcttaaaaatctatagtaaatgcctactttactttcattgatcagtaaatgctgattagcaatactctcactgcttatatcaccagtaacttttgtatagactagagcaaaattagattttttaaaacaatttttaggccaagtagatttcctgtgtaaagaatgattggcccaaagtcacgatatattcaaatcatttaagatattataatttggtcgttttcttcttatttaaaatgaacaggcaatttccaaaaggttagtttaaggtttctatcctaagtagcaacctttgcaagctcatatatgcagttctgtctgtatgcagaatgtgaaattgcaaatgggaatgaaatgctcatcaatcaaacatcaaataccaacagaatccaggaaacactttgcatttccaattattctatatcactttacatatcccaagatcactggcacataaaacaccctgtgagagagaataaaatattgcgctttcttagattttatatatattttatatatatctgtatatatatctctatatatagttaaagatatataaagagaagaatagaaggaatgtgttatcagagatactctctttttattttttatttttgagatggagtctcactctgttgcccaggctggagtgcaatggtatgatctcgcctcactgcaacctcaacctcccagattcaagcaactctcctgcctcaacctcctgagtagctgggattataggtgcctgccaccacacccagctaatttttgtatttttagtagagacagggtttcaccatgttggccaagctggtctcgaactcctggcctcaagtgatccacccaaagtgctgggattacaggagtgagccactgcacccagccagagatattatctctttaatctgccatgatttgtcatgtatctcaactgatactactttccacagaaatatactttgcctttgattttatcattagctaaagttacagtggaaaaagcaaaaacaataaatcttgtattattatcgatctataaaataatacaagagcaggagcctaaatattttttagtccttacttaaatcatatgatagcagtattttcccactatgctggctgacatcctcccctcatggcctaagaagcttagaactaaattaaaaactgtagagattatctagtccagtacttcccaccttttgcatgccctgttacattgaaaatagtaatatttaagcagaatactatgggagaggagtgattacatgtgaactactataggtcactgctcttaaaatcttaggccaggcacgatgactcagacctgtaatcccagcactttgggaggccaaggcagatgggtcatctgaggccaggagttcgagcccagcctggccaacatggtggaaccccatctctactaaaaatacaaaaattagctgggcgtgatggcagatgcctgtaatcccagccactgaggaaggctgaggcacgagaatcgcttgaacccaggaggcggaggttgtagtgagccaagaaaatcttaggcatcagaatttcagagagtttataaaagatgccatataaactctttaatggaatttcaactattgtaaattcttaagtagtcgtaaaaaaaaacagatttcaatttaaggaaattctgccccagatattttatttacagaaattacaaaatcacaagttccatcccattgcattttaaataccacactttgttttaaaatctgaggatctgagcaggctgaagcctggtctggcctatggtccctggggttggagaatttgtgtggctatgctttcaaatcaactgaaatgtgtccctatccttgctcttctcctcttaccctgccactgccaaagtactgggctcagaatcctgactctccttcctttcactcccttctctaggtcctgctgtgttcacaggaagctgtggtctgcagctgctgtcctggacacaggacaacttggttagggcttcagcccctatctggactctaattccaccttggtgtgtttattgcagtttcgtgcatccttatcatttttcatctggtctctggcaggcagagtgtatgatgacttctctgtccctccttgtctttaactcaaatgatgatcttctctttggtgttttttttttcccccgtttttctcagctgtgctgttgtgagagtgcttcatcactggagccttcagatgaactaggtgagggactctgggccccacaacccttctcccagagctgtcttgtggcatcattcaagtcctctgggtcaggcaagggagagaggcaggaagttggtaatttcattattgatcaactcgaatagttcttcccttgatcttgattccattaaaattgtcaatggccaaaatggtactcctctggccctcatagcaggtaaaacagaatcctttggacgcattcctgacttcctgtcctgtacaagattaatgttaatatatctccccttattgagaggctacacagatgacatcaccttcagtcagttcataacaaagccctcccgggaacatccaggagctgtccttgtacacagaggacgggatgctttaggagccactgcaatatcagcctgccttttattcagcttcagggctagcttcacattgattaatgagttcatctttgtggggtggagtgccacacaatggtgcctgggtggctgaaccatgcccacttctagagaacagacaagggaggataccacttctggtggaggccctcagggcacctccacagtctcttctccaccctccccacatgccttcctctgccatttaatgttcaacttttcatggtagtccagtcaccacacagaagtatgctactgctcactagttggaaagatctaaactagtcgagtttcaaaataggatggccaagctgcaacaaagacttctgttctgaaatggttcctgatcatggaagttttaactctactatttcaccttttgtccaggtaataaatcctttcgagagcctataacatgttatgttcacttgggccaaattatgaaaggtaaatatttgatgtgttacaaagaaaaaacttagactaagctttgctttgagtgtacctattatattagtcagggatctacagaaaaacagaaccaacaagatgtttgtatagataggtacattcattataaggaattggcccagggattatggaagctagtgagtcccaagatctgcagtcggataagtaaacacccaggagatccaaggttaagttccagtctgagtccaaaggcctgagaaccgggaaagccaatattatatgctacaggttctaaacccaagaagagccaatgttacaattcaagtctgaagaatggaaagagcaatatcccagatcaaaacagtcagacataaggagttccctcttgctcctgggaaggtcaggccttgttctatgtatgccttcaattgattggggtgggaccaccaacattgtggaaaacaatctgctttactcagtccaccaattcaaatgtcagtctcatccaaaaacaccctcacagacacacccaaaataatgtctgacctaaaatctacacactctgtggcctagtcaagttgacacataaaatgaatcatcatagctaccatgtttccagattgaatgagccctaagcagtaataattctgctccatattatacctatttgagtgatatagaaggtgattctttgctcttaaaaatggcagttctcagggtgaatatagtacacatttgtgtgcacagcttcaaatggcactaagaaaccagtagccactatcagtggcaaaggctccagtgtgtagctgcagtggcattttggagagccttattttgatttgatatctcaaaataagccaaccaatttcttataaaactattgctacttctgtaacccacaactctgtaaaaactgtgattgttcccccaaagatgtgcttcacttggtatttcaagtcatatgatggcaatcccattgaaagttccataaaacagtcacttaggtgtattgctcatactcagtctactcactagtccaacctattcgacttgaaactcagtaaataattgcagacttgtcatcctgcctttatttcctttatatcattattgttagcacagataaaaggactcaaaaatggcacataatagggaagctgaatatgtcttagaagtcccttacacatccgtaggacagaaaataaaccttaccattgttcaatttgacccacaattaaatatcatcttaaaagcaagatatatgtatttcccagtgaagatagcaggcttcttgatttattttacttatgaaaatagactaatgtaacatatgcttcggtgacaatttatcatggatataggtggtaaaatataacactgagtattggagaaagatttgaaaaaatactccagtatagtaaaaatacttagtccaggagcttaaataggttaccccaggccttttccctagtaaatatttaaggaattctatacccttgacaccgtatggtaatcaggaagtggaagtcaacaactttaacttataaatatgaaaggcattgagatggaggaacagaaaaggaaaaaatcctctctggcattggtattacttgtatcatcatcaacaagacaagttacaaacgtttcatagaaagacagcgggaggaaaaggctttacaaaagtataagtaaataggaacacaccgctatccatataaatcccctctttctttaaaaagtccacttcaccaaaaaagccacattaggcaccgatggcccagtgcctagggcccacaatacttaagatgctcatgaaaatgtcttaatttcttttacataaaaaaaactttcatgttaaagaaaatattttactatatagtaacctattgttatattaacgtaatgataaaacataatttttaggttccttttgtgtgtgggtatgaggttaggacctatgaagacaaaagtgcctggggcccataaaagtcataatatggtcctgttcctagattcatgtttgtcttatatggccctatttctctggccatagctggctagaatagggatagaccttgacctaagtcaagcctatcaaattctgcctcctatgagtttagaattgagatttaaacttgcttggtagtgctagatagtgtgtgaggacctatatcctttgaagtagtcatgagtaaaaaagtgacaaaagatcgtgtattagtccattcttacattgctataaagaactacctgagactggatagtttctaaagaaaagaggtttaattgacttacagttccacatgctgtataggaagcatggatggggaggcctcaggaaatttgcaatcatggcagaaggtgaaggggaagcaaacacatcttcacatggcaacgagacagagagagctaaggcagaagtgctgcacaccattaaacaacaagatctcatgagcactcactatcacaagaaaagaaaggggaaaatctgcccctatgctccaatcacctctcaccaggtccctcccccaccactggggattacaattcaacatgaggtttgggtgggggcagacagccaaaccatatcagaccatctgcaagagaaagagaagaatgagagaacctgtgagacagagagagaatgagagagacttgaggctgtggcctgagatcctgatgttctccagtctctgtatactaaaggttggttattcaaacttttaaaaatctatgaggtgtcccagtatccttccattcaatcagaatttttggctaagctgtttgaaattattttctgctaattttcatccaagaatactgtattcgtttgctagagttgccacaataaagtatcataaacatggtggcttaaagaacagaaatgtgttgtcttccagttctggaggctggaagtctgaaataacatcagtaaggttgattccttctgagggctgtgagggaaagatctgctccaggccactgtctttggcttatagacggccttcctctacctatgtctcttcacgttgccttccttctatacttgcccgtgaccaaatttcctggttttgtaagcacaccagtcagtggattagggcccacccacatgacctcactttagcataattacctctgtaaagcccttttctccaaatgaggtcataatctaaagcaacagaggacaggacttcaaatataaattagtgcagaagtgtggagacgatctaacccaaaaaaagtactaactaaaacaggagcacaaacatagactcaattatagcatgttcatttattactgtcattaatacttttttgatatatttttctcattttttgaattttaattttaaaaggcattttctatatttcctcttctttctcctaaaccttaataaattacttaagatcttaagttccccaaatatgacacaatatcccataatggcaaagaatatggactctagcatgagactgcctgagttcaaagcctgcctttgtcattacagcattcataggcaagttactcaatctctttatgtgtcaatttccataacagtaaaatgaaatagaaagaatatttatctcttaggggtgttatgaagattaaataaattgctatatgtaaagtgcctgacagacagcaagttccatctgagggcttgctattattattatagagctcaagcctttacttgtgcattggtctttctttatgaagtttgccctttaagacaatcacaaggcaaatctcaactgctgactgccttttctgggtagggcctagtagcacagactcatcttaaggccttatcttgcctgcatttgcatatgccactgagttcctcaggaccactgagtatctttcttcaatttcctcacctgtgaaatggagacaataatggtaactaccataaggagtttgttgtcgtaattaaatgagttaatttatgtaaagtactcagtacatactgtgtatacccttaatgttttgaccaggtggcaatctctgacactgaccagagagcccaatgacatagcactgactctgatgaagttcatggccagatcactgctctaccctacagagtcttgtgaatttgcaaatactctctactttattggagttcatagtcaggataaaagccctaattttgacttgctttggtctaatataaacaccatttagtttctttttttactatttcaagtgtaatgtttttaatattataagaacaatacttgagacatatgaatcttaaatttgtcattttaattgtaagttaagagacagagatagcctgtatataaaatatccataaccacatgccatgcaattaaatatttctgcacaactgttccaaaagagtattttagccttgctctacagggagggaaatgatgtacaaagattcatttatatttatacagtatataaaaatacttgaaatttgttggcctctctttgaggaagggaatctaattctcttataattaaaaagaaaacatttctctcagctagagaaattaatagaatttatagatatttaataatttgataaccactttcttcaaagtctctatatatgtggtatatagaaaacaacaattatctagaaaatatacaaaacaagcttctattttatttgcattccagaacaagcaaattgataccacaatatgtgttgcctatattttagaacaagaaagaaatttagttacacctctgatgaaggaacaatttggaattatatcattgtaaaactggggaaatccaatacatagaagtaagaacattccccataatggtactaattactgcacagtatccataacctttagagcactgagcttaactcaaacaaaataacagatggtgtttcaggaaaacaagcattatattgccttggtttttcttttcatgtgcgactgttagagaaaattatgttgggagttcactgggacctaattatatttggtcttctattctgaattctgaattccgtctatctcattccaaataaatagtataattatattaatttaacccaaaataagatagtacactgattaaatatcatattagaaaacttattctacatatctggccaaacattttaccatctgatagggtaaaagaataagctcttcaaatgtgtattttatttcagattaccatttatttttttcatgctttaagtttgcattttgaagttaaccactatgggggaattcagacaacagcagatgaaaatactagctagaatattatacaagtggcattttcctgtgtcaatttgtatatgtatcacttcctgtaaataaacaaacaaacaaagcctggttaaatctaaaacaataattgagacacttgtaggcagacacacatgtagatgatctctcaagagagtgatagtatgatttatatccatcttgttaaacttaaaaaatacattcctcttgagtatgacaacttcacctgctgagttttgaaaggcgtgctgactcaacttcacagcttttagtctcttcctccagatgatcaattagatagtttttcaacagaagaccagctaaagggctgttgtcttctggaatggtaccaagcagtctcactgctgatctaaatatcagctcaacgagaaccgccacaatgcagatctgtgtatctactttacacctattccgtggcctccattttttcacctctacttctatgaatattcacttacccagaagaattggacatcaactcattagttactgaattaaacagaccaatccctgaattttggaaaaagactgaagtaaaattttactgtataatacatagaacccaacatatggcagacaacaaatgtagaatgacctacactgcgtatttgttgcattagctactactgcttaacttactatctagattccccgtcctccaataaaatagctggactcattttaatcatcaatacccttgagtagaaactgtaaactacttgctctgattgttactatatagctagcattagaagacatgttctatttcaatttactgaatcatgatttttttttttttttgagacaaggtcttgctctatctcccaggctggcatgcagtggagtgatctcagctcagtgcaacctccaccacccaacctcaagtgattctcctacctcattctcccaattagctggaactataagcatctgccaccatgctcagctaattttaaaaaattttgtagagatggggtctcactatattgcccaggctggtctctcctggactcaagcaatcctctcacctcggcctcccaaagtgctgggattataggtgtgagccactgtgcccagcccatgaccattttttttaattgatcaatgatacttgttctttaaagtccaatccctgttcagattcttccctgctttgttgttctatgagtctctgctgaaaataattgacaatcacgtaccttttggtctgaccatcaagactgtgttataagtgagttgatgtctttcttggtcatttgggcagagccaaagcattctttcattaaatagttcttatgctttttcaagtaatgttacaaggaaatttcagtgcctagaataaggactaacacaaatataacaaaatcttaccttagctgtaatgtgactaaccctcctggatattatgcttggaatctcacaaataaactagaaatacttcattcctcacatcagaatatatagggccagaatttggctcatgtgatcagactgaagatgaaattttcactaaaccatgaactctacttggcaatggaaatgacacttttttcaaaatgaatcacatcctgaaagccattggtccacatgccccacatcagtataaatccttgcagagtctggagatttatgttttcagtttggcctttctttcgattattggagagctttaatttcttttcattattttggattccctcatttttttccctacttctaattctctgcatacatcacacacctgtatttgtctttgataatggaaaaaaagactcatcacttttaatgcccactcaacatatcttcattatcttgggaatatcttcaccaaaatatattaaaaagtcactagagaaaaatgaatgcatatacaatgtatgaatattgctgggctaaatgggtacctctatctcattagtcagcatggagcctcctggctgcatgcctacatttcaagcccagccagaaaaacaacaacaacaaaaacaacaaatagatttgagacatccaaatgaaaagaaatggtcctttttctgattgtgttaacattctactagttatttattcatttatgtctttttcttagtcttctgcagcagaatcaagcaaatcccatttgttccttcactccgccaatatttattgtataccttctacataccaggaactattgtaggcactggaaaaaagaatgaacaaaatcagtagatctcctgttttcataacatttgcattctagaggaagaccagagacaaacaaataaatacacaatatgtcatacaggtagtaagatctaaggagaaaataataacaagggagggtgagaacgaaactgtgctcctggacagtgaggattctattacatctaggtgttatttgagtgggaacttgaaaggaaaataaagaagaaagtcacgtaagtatctgggaaagtagtatccttgacggaaaactgaatttacaataaaagccttcatttatacgatctgattgggactggcttgaggggagccaagttcattccattttcaagtaaagaataagtcagaattatatatcctttaaaccactgtatacttttagaaactctgcaaaagtcctctgaaaatattcttcacttaacccttactcatactttgctaaactcttccaactttgcattacacaattgataactttaaactaacctacagtactctaagtttactttacatttttttaatcaatggtgggtacattagtgagcatccaccatcagtgagtacattttattatacttcctagttgtttggttacttgctaaggaaattttctgcaagtttgcagactgtgggaatataaggagcacaacgagtaaggccagatgtcctccctcttgtttaagagcttagatttcaagtgacacttgtatactttaagtagagactgctgcttttcatagcggtgtgaatgtttgctataccaagatgctgtgatcgttcaaagtgaatgcaaatgcctgtcctcacaggcagtctctaaaggcaatctgataaatgcatgtagatgtttgaacataaactgaaagcaagaggaaaagagcacttaccaaatggagtagaatacccaatgaatagagtacaagccattttgttcttggagagaaacaatatgactcctttcttttgggaagtctgtttcttttctttaggtctgagcccattaaatgattcaatttatgtttatcacttagacaataaacattatatccctttcctctctgactgtaagaccagaaggaaggtgggagaaaaaaagcaaagatttcccgaggttcacagatacctgaattcaaatacagagaatataaatgagaaacaacacttttgtcactgaatttaacctgcctttaaacctgataaagttgcaaattcaacattgatttttctctaaaaataaataacttattttgaggaacagcagatgaatttacaccctatagaaataatttaggatgctggttccctaaggtttttcccaagactaagaaatattgatcaagagcaacaggaaaactccccagcaaaataatgtgagcagtttgaaattttgttttcatattttgcctttattctcagtatctcctataaggagcttagttgtcactttgacatttattgtctcaatattcacatgtataaaatagtgaagagaaaaagtatcatttttaatgattgacagtaacagggtttagataaaacttccaagagctaagtggattgttgaaggaattaaacagataattcatgcaaaaaattcacagatgtggctgagataaaaaattgtttattaggttttatgcctatatattttagataatcaccttgatttcttctttgttcttcatggagagatacaggctgagtaatttgtgtaacatatattacctatatgctgcttttggtaccatgatctgtttaatcaacatttatgcttggttgacttttcttaattaaaaaaggaagattaacttagctattaatttatgacctaaaagtataagcttccaccttgccaaactactatctagtgcttgtaaatgactgtgtgtttccatttgactgatttttagtgacagcatggcatagtgaccttaaaagggataacatggtgataatgtacaataatgatatatcgaatgtttggtgaaaaaaaagtagcatacattagtgcatccctgctatgattaaactatgttacaagtaagacaaggatcgaatggaaaccagagaaaatataggcaggttagtttgttgccatcgtgggaagttggatccaagtagatttagcttcaactgaaatgtattggatgcctactatgcgccaagcagtctgccaagttctttcatcttttttatctccttatatctcatcagtcctgcgagaagattattattattctcacttcaccaacaaatacaaaaacaactttcaaagagcagactcgagattacacagcttcatgagaaactgaaatgtaagccatggtttctgatttctttcacacattccctacgtcatgtaatgcgttaaaaagaaataaatataactaaaacacctaattagttcaactacccccatggcttaaatatatacataatatatgctatatttaatacatagagcatcactgtcattagttatgagactttcaggaattatgtcttatgtatacaaatgtattatgtatatagcaaacctggaagtgaaaatgggtaacagctgtaataggattgtggtggagagatccaggatatacaactgtgaagtctttttctgaattctccttatctacctagaagtagaaactttcaaaagaattcaactatcatgaatacccctctgaaggagtctgacgctacgaaaagaccgcttgcacctgcataaataacaccacaatttctcccacttgttcccctaagaatctatatgtctttcctaaacatgtatgttcttctcatcaaagccttttctctctccttcactttttcttttaaattaggcctataagaccctaactttagctatttagtgaggccacttcttttgtgtgctcccgtatgcatatataaataaactttagtttttatttctcctgctaatctgtcttttgtcagtttaatctgcaggcctccaagccaggaaccaaagtgagtacaagaagagttttccctccgcaacactttggcaatgaagatgggatggttgggactccccagtcactctgaaggctgcagctgagatctcaggatctcttgaccaagccagcaaaggtaaatttccttgctgatctctgctcagcatccagctgagtgcgtgcagtaagaacttgtctttgttcaaacaggaaaagttccctgatcctctcacagggcatgtgatgggggtgtggcttgcttcttcgtgccccactgctcaaacctctagggaaacttacagacgggcaggctgtggggctctgactcctcggcagtgtctaggggtggatgtttacagctcctgaagcctcagtgggcgtgtgtcagagggtgcttagaggtttgccgtctatccgtctacgggtggcttatgttaaccagctcaattagaccctctaccttgtcacaaggacagagggctgtttcctgagttcttgccttggtgtagtggaagaattggaccacacgtgggcttggagaatgagtgtaaagttttattgagtggaagtagcgttcagctgatggggcagccagaaatgagatagtcttccgctggagttgggccactcagcagcctgggctctcctccgactgccctggccaaactccgcctcatctggttggcccatggcctgccggcatctgttggtgtgctcctccgccagcgtgcttccccgccagcatggtccccgacaggtgctcctccgccagcgtggtcctcggctaggtgctcctctgccagcgtgctcccccgccagatgctcctctgccagcggggtcctcagtcaggtgctcctctgccagcgtgctcccccgccaggtgctcctctgccagcgtgatcctcggccaggtgctcctccaccaccgtgctcccccgccagcgtgctcctctgtcaggtgctcccccgccaggtgctcctctgccagcatgctcccccgccagcatgctcctctgccaggtgctcccccaccaggtgctcctccttcagatgctcctccagcaggtgctcccccgccagcgtgctcctccaccagcgtgctcctcctccagcgtgctcctccaccaggtgctcctccaccagcgtgctcctccactgctcctccgccagcgtgctcatgcgccaggtgctccttcgccagcgtgctcctccgccaggtgctcctcctccaggtgctcccccaccagcgtgctcccccaccagcgtgctcctccgccaggtgctcctccaccagcgtgctcctccactgctcctccgccagcatgctcatccgccaggtgctcctttgccagcgtgctcctccactgctcctctgccagcgtgctcctccgccaggtgctcctccgctaggtgctcctctgctaggtgctcccctgctaggtgctcccctcgacgtcttgtccccgtccagctgcttgtgtcttcttccgctgatgtgctcctctccacacccggccgcctgtgtgtctgcccgctagggtctcaggtttttataggctcaggatgggggcatggcaggccggggtggtctcggaaaatgcaacatttgggtacaaaagcaggggtgcctgtcctcacccaggtccgtgggagtagagcccttgccagggaccacaccgcacttccctctccccttcagtatcatttaaagggaccatggtcttcccttcccagtactaccatatcattgtcttttctttacaatatttagattagctggagaaaacacttatgggaaatagttatttgggtattgtgacttttagtttgcgtactcttgttatagatccttttgctcacagggatagtcattgtgccctgtttgtcttgttttgtgtcttgaaagcttggcttggatttagtaagagagttctctctctctggttttctgcctgccaggagtacaggttgccaagtctgtgctaagagatggccaaacatcagattgggatcccaagaatttgtagttagctggataaaaatctgggtagcccgggcattccatttgttgctggcattctatccaccattgctaattttcagcagtttcatcacagaaagacagagacttagaagtggtgtttatagaagtggcttgagaaacgaccttagattccaggggctgtatgttctgcaccctttctgggaatgcctcttgtgtccccactgttaagccacagaaagtcttactacttctgagtcgcattttggaacaggtatacctttggagatcctaaatcatgaatggccagatgacagatcctttgatctgaaaaagcttttatatttaaaaggatttttagagagcttcccccctatacaaatgacctgtttgtacctatggaaaaatcaaattaaaagaagaagaagagtatcatggctagcctaaaaggatcccttggcaaaattaaatagcagaaatcacatttacaacaaaaattgaaatccacacagaccataaacccttccactgacagttattctgtagttgtgccacaagccagatggccccctgaaaaaaattctcctcaccaacataacaaatggccagacccttttctaggccttcctgtaaataatcagaagttggctgatttggaggctgatattcagggcctgatatggtttggtccccactcaaatctcaagttgaattgaatatcccagaattcccacgtgttttgggagggacccagagggaggtaattgaatcatgggggccagtttttcccatgccattcttgtgatagtgaataagtctcacaagatctgatagtttatcaggggtttctgcttttgcttcttcctcattttctcttgccaccaccatgtaagaagtacctttcacctcccgccatgattctgaggcctccccaaccatgtggaactgtaagtccatttaatcctctttttcttcccagtcttgggtatgtctttatcagcagcataaaaaaggtctgatacagggcctgatgggagttattttagaagccttccctctgaagtctgcttggactaacatggaactatgtattccgaaggagggtctcatcccaaaacctgtgtcaaacaattggcacatagctctaaatccagaagccctagaacatagaaatcttttgatttctaccttagttagaagtcttcttccttagatgtaaagaaacaattaaaaaaaaaatcaggtataagccataaagtgttgtgtctttaacaaaagagactgcctcagagaaccttagaaaggactgtgacagatactgtgtggtacaggcttctgatgacatcacttaaataactttaagattataccactgacctaagtaaaagaaaattcagaacttatggagatgctgataggtcataaaaccactaacccaagatcaagcaaaacaagaattacatgaaattgaatgaactgatgaaaaatgattatcattttgcttgtgactcttgctcaaaatattgctagctgtttagtattctgttttctggatataaggaatccctttccttttctctccagctatctagaaatcaaaacaatttagtagattatattcacaatagcaaagtcacagaatcaacctaagtgtctaccctaagtggatgattgaataaagaaaatatgttatatatacactatgaaatagtatgcagccatataaaagaatgaaatcatgtctattgcagcaacatggatggagatgtaggccattatcctaagtgaaataactcagaaacagaaaatcaaatattgtacattctcacgtatcagtggaaactaaacaatgggtacacatgaatgcacagaaggaaataatagacactaggaactccaaaagtgaggatgttgggagaaggcatgagaaatggaaaattacctgttgggtacaatattcattattcaggttctgggtacactagaagcccaaaccccaccactacacaatatatctacgtaacaaaccttcacatgtacctcctgaatttaaatttatttttttaatttagtagattaaactttgtcaacaaaaataaagcatttatctttttctctctacctaatcctgtcagaaattggaggatacttttgagtatttttatttttctgtaaatatagttatttgcataaatttaataataatctgttctccttgtaatagaatgtctttgttttgtgctgctgtaatagaatatctgagactgagtaaaagcaaaaatttatttcctcacatttcaggaggctgtgaagtccaagatcaaggttctatgtatttgtttggtctcacattactataaggaaatacccaagattgggtaatttgtaaaggaaagaggtttaattgaatcacagtttatcatggctggtgaggcctcaggaaacttacaatcatggtggaaggcaaaggggaaggaaggcaccttcttcataaggcagcaggaagaagtgctgagcaaaggaggaaaagtcccttataaaaccatcagataaggagagaactcactcagtatcacaagaacagcatgaaagaaaccacactcatgattcaattacctacacctggtctctcccttgacacttagagattatgggaaatataattcaagatgagatttgagtggggacacaaagcctaaccatatcattccactcctgacccttcccaaatctcatgtttcattcacatttcaaaaccaattatgccttcccaacagtcccccaaagtctgaattcattccagcattaacccaaaagtccaagtttaaagtctcatctgagaaaaggcaagtctcttccacctatgagactgtaaaatcaaagcaagttagttgcttcctagatacaatgggagtaaaggcattgggtaaatacacccattccaaatgggagaaattggccagaatgaaagggctacaggccccatggaagtccaaaatccagcaacacagtaattaaagcttaaagctctaaaatgatctcctttgactccatgtctcacatccaagtcatgctgatgcaagaggtgggctcccatgatcttgggcagctctgtccctgtggctttacaggttacagcccccctcccagctgctagtacaggctgacattgagtgtctgcagcttctccaggtgcatgatgcaagctgtcagtggatctgccattctggggtctggaggatggtggctgtcttctcacagttccactaggcagtgcccccatggggactctgtgtgggagctcccatcccacatttcccttctgcactgcgctagcagaggtactccacaagggctccacccctgtggcacacctctgccttgacatccagacgtttccatgcatcctctgaaaaatataggtgggggttcccaaacctccaaatggtggcttccatgcagagttgacttctgtgcacccccaggcccaactctgcatggaagccaccaaggcttggggcttgcaccctctgaagcaatgacctgagctctatgttggtcccttttagccagggctagtacacagagcaccaagttctaagactgcacaaagaagcaaggccctgggcctggcccaggaaaccatttattcttcttaggcctctgggcctgtgatgggaggggctgccatgaagtcttctgacatgccccagagacattttccccattgccttggcaattcacatttggccccttgttacttatgcaaatttctgcagctggcttgactttctccctagaaaatgagtttttcttttttgtcacatcatcagactgcaaatgttttaatcttttatgctctgctcctcttttaaacaagaagggagctgattggatcatgggggcatgagatatgctattctcataataatgagtgagttctcacaagatctgatgatttcataagtgtttgaagttccttcttcattctctctcctgccaccatgtgaagaattgaagaaggttcttgcttcccctttgcctcccaccatgattttaagttctctaaggcctccccagacatgtggaactgtgagtcaattaaaactgtttcctgtataaattacctagtctaggacatttctttatagcagtgtgaaaatgaactactgttacacacctgcatacacattatcataaactgtatttcccatatgttcctccaaaatccatttgtctttcctaaagaaattcatgttttcttctcatagaagtctttttatcttccttctctttttaaacgaggtacataaacctctacctttagccatttagtgagccacttcttttgtgcgctcccacatgcatatgaatcaactttctgattttgttttctcttgctagtctgtcttttgtcaggttaatctgggggtcccaaccactgaacttaaatagggagaggaaacttttacttcccagacaatggttgagcatttagttctcaaaaaaaaggcaggggaccagcagaattaaagagagcaaatagataatgatgcctgctgaagacaaaaaagaagtggaacaaaggaaaaatgtagaaagagcagaaggtcaagagaaacatggcattctttagttggtattaaaacaagcctatagactagacattacataaataaatatggcataataaaactcagtaaactaaagtcaactccttatctacatagaccactgaaaaagtaagagttggaatcagaagaacttgtgtgacccaaaactatttaggaaatagaatacttatctaatggctgtatttaattcctttcaaaaggatagaatgataaaatttattgtttcctactgttccaacacgatcattacaaaattttctgtataaactggaactttcaaatttcatgctcgaactaaatctgatatgaagatgactgtggccccttgggaagaattatgatccaacaatgagaagccttggccttcatctttgtggtacatacatcattcattatagatatctatgtttcataatagaccttgccagtatgaattgtatttctagcactaggctgataaaactgacacctcagccttccaaagtgatatctaaatatggaatgcagaggcaattattgtgacctatggctacaaacataaacattccacataaccctccaccaccacgacacctacaaatgcacaaattaccatggatatgtcatttcctaaggttgaattatgggccagcctacccacaggacaagaagaagcaccctaagattaattaatttgcataaattctgaggtgttttcctcccaaagtttatgcccacattggccttcctgactcacagttaaacctctctttgggataaaataaggcatgggcaaagccttcataactaaaacaccaaaagcaatggcaacaaaagccaaaattgacaaatggaatctaattaaataaagagcttctgcacagcaaaaaaaactatcatcagagtgaacaggcaacctacagaatgagagaatttttttgcaatctatccatctgaaaaagggctaatatccagaatctacaaagagcttatacaaatttacaaggaaaaaaaacccatcaaaaggtgggtgaaggatatgaacagacacttctcaaaagaagatatttatgcagccaacaaacatataaaaaaagctcattttcactggtcattaaagaaatgcaaatcaaaaccacaatgagataccatctcacaccagttagaatggcgatcattaaaaaagtcaggaaacaacagatgctggagaggatgtggagaaataggaatgcttttacactgttggtggaagcgtaaattagttcaaccattgtggaagacagtatggcaattcctcaaggatctagagccagaaatacaatttgacccagcaatcccattactgggtatatacccaaaggattataaaacattctactataaagacacatgcacatgtatgtttactgcagcactattcacaatagcaaagacttggaaccaaccaaaatgccaatcaatgatacactggataaagaaaatgtggcacatatataccatggaataccatgcagccataaaaaaggatgagttcatgtcctttgcagagacatggatgaaactggaaaccatcatccccagcaaactaacacaggaacagaaagccaaacactgcatgttctcactcacaagtgggagttgaacaatgagaacacatggacacagggaggggaatatcacacaccggggcctgtcagggggtgggggcctaggggaggggtagcattaggagaaatacctaatgtagatgatgggttgggatgcagcaaacaccatagctcatgtatacctatgtaacaaacctgcatgttctgcacatgtaccccagaacttaaagtacaattaaaaaaaatacctatcctcagattgaattatgctgtaaatgtgaaagaacctgtctcagtgctagctacatagaacaacttcaataaatatttgctgaaaaagtgagccatgcctccaaataaacgccctagacaattacagacagagctagcatattacgaccacttgataaccactgttgattgtacaattatcttttctactccttcaagcatatggagcagcacagagctttgtcaccattttctccacttatcctgcctaattgcctcataaactttgctccatgaataatcctatattagtctggtattttcaatcacttattctccagtgtctttctctctcaggccaaaatatggttggggctctcacatacttaaatgatccccatttaccctgcctgaccttttgataactgtcctatcttcatctttcaggtcagaatattctagaaagaagattctgtattcactcctttctgaacaactgtctatgaactcttttttttccttttattgggacggagtttcactcttgttgcccaggctggagtccagtggcgcaatcttggctcactgcaacctctgcctccccatttcaagcgattctcctgcctcagcctccagagtagctggaattacaggcatgcaccaccatgcctggataattttgtgtttttagtagagacagggtttctccatgttggtcgggctggtctcgaactcccaacttcagatgatccaactaccttggcctcctaaagtgctgacattacaggcatgagccaccgcacccagccactgaactcattttaaactggcttctcctttacaactacaaaaaatgtggcaactaaggctactacaagcttcttagctgctcctttcaataaatgtggttcaaaattcatataactttatttttatttttgtttagtgatacttgtcttcctggaactcacttagcttcaattacacaaaatcctccaagttttcctctttctgatttttctttcttaatctgttcttctagttcatttttctccttttcttcataattctttccttgattccttccttttctcagtctgcatatactttccttgagtgatctcaaccatcctcacagttttaatctcacctatgtccctaaatttctctctaacactagctactcttcagtcttcctataaaatatttgcagctgttccttgataggtactccacaggaacttcaagctccacatgttcaaaatggaatgtttctttaaatattgtcatccagcagtaatttcaattatgctcattaccaaacaattcccaagatttgttcattctaagtcataaatatgtctggaatctgtcttttcccctcaatccccaccactctccctgagctcatgtcttggacagttatgatactgtaaattttattctcttggttcctcaatcttctccttgaatatgtctctctgttactaacataagaacaaaataaaatcttttgcttagctaattcactcagacttcttctaatcttctaccatggccacacgatttattcattcattcaagaaatctttattataattacttaatatgtgttcttgtaaatggcagagatataatgatgaataaatggtggtcactaaacttgtgaaatttacaacctagtagagaggaaaagcaaacaaaaaaggttacaaaagtggtagatgctatgtatttaggatatatatattcagtacagcagaggcattagagaatgagtggacgacttttctgattcttaggcccactgatgccacactggactcttgaaagaacagaatgatgaggaagggaagagttttttttctcatcttttattttaggctcaggggatacatgtgcaggtttgttacatgggtataatgtgtgtcattggagtttggtatacaaatgatttcatcacccaggtagtgagcatagtacctgataggtagtttttttaccctcaccatcctcccaccctcaagtaggccctagtgtctattgttctcatctttgtatccatgtgtgctcaatgtttagttcccacttataagtgagaacatggggtatgtggtctgctgttctgcattaatttgcttaggataatggcctccagcttcatccacgttgcagcaaggacattatttcatattcttttgtggttgcatagtattccattgtgtatatgtaccacattttcttcataatccactattgatgggcatctaggttaatcccatgtctttgcgaatgtgaatagtgctggcatgaacatatgggtgcatgtgtctttctgttagagcgagttatattcctttgggtatataccggaaatcggattgccaggtcaatggtagatctgtgttaagttctttgagaaacccgaaaagtgagttttgaaaagccttgtgctctagataaaccaaattacttaagatttcttttattctctctctcctttaatatgtcgtataactacacatattgctcctaattaaaatgtctcctctttcagacacccaattcactccttctaagccatctcaaaagtcatctatcatgcagaccttttatgactctcccaaaaactaaatcattctcttctctctgatccatagcttattggtaactctaatctacactgtagtcatttgcttccacttcagttatttagagggaggagttatgtgttttccatcttcgcatcctgatttctggcaaataacaaccagagtctccattatcatctgttgaatggttacagcacaccaagtgtttgatgtacattatcactaattttcacaataatccttaactgtaaacattattatcatgcttacatctgactaaggggcagagaggctgtgtttacctagctcaacacagttagtaagtggtgaagctgagtttgaaatttaggtgtcaatctctctccaaaacctatatattcttattgatgaactacagtatcatcctagtcgatagtgaaggaatgttgaaaggataaatagatagattcatgaataaatcagtggttgagtacatgatcttctagagttgaaataataaaatattagcacaagctccatacccattagcttcttctcatatgtgagataatactgaaacccacaaaattttattgtagtcttgctgcgtatatcctaatcgtctgtcttgatctgcttatgtcttatatagacatatacacaaaaataattgcttttttaaatgaaaacttccataagattccacctagtagaacataaaataatacagctgaacatatgtaattacattatgtaattatgctatgtaatgccacataaggtattatcaatagattaagtgtttttgtccagatagaaaacaatctgataaataaaatgtgattattgctgtcattagatatactttagaaagatattttcacttgtttcagatcttatacctaatatcctaagttatgttgtaacttcatcacatgtaatgtgtgatatataaatacccaaataggaatagatcatattttggtgtcatttggtgtttatcttgcctggaaatcctagaaaccagaaaccagagggtgacagacaattctcagttttgtgcattttgtattaactttcataagcaagttctataatttgcaacctcatgaagacaacaaaaagttgaggctgattatgtctactaaatagttaccttgggcatacttctatagttaatgtccagtgagattttagtattaacttactatggcttccatattcctcagcatacattaaactatgctgcagtaacacatcaacccctaattccaaggatatggtaggttaaataatgatatctgatatgacgtggatgtttgtcccctccaaatttcatgttgaagtttgacccccagtgttggaggtgggcctagtgggagatgttcaggtcatgggagctgatacctcaggaatggcttggtgttgtcttcatggtagtgaatgagttctcactctacgagttcacgtgatgtactggctccctctttgccttccaccatgactgtaagcttcctgaggcctcaccacaagccaaacagatgcacgtgccatgcttgcacaacctacagaaacatgaaccaaataaaacccttttctttataaattacccagtctcaagtattcctttatagcaatgcagaatggcttaatatagtctccaatggtgtccatatcctaatctcaagaacctgtaactatgttaccttatttagcaagagggactttgcagattaagttaagaatgttggaatggggaactatgctggattatttgggtgggtccgagtaatcacacaggtcctcataagatggaggcaagaaggtcagagcgagagaagaaaatgtgaaattagaagtagcaaacagggagacaaggagaggaaaacacagatttgaagatgttatgctgttagctttgaagatgttatgctgttagctttgaagatgaaggaaggggccacaagccaaggaatactggtatcctgtagaagttgcaaaaagcaaggaaatagattctccccaagagcatctagtagcactatacagctttgacaacatcttgattttagaacttctcaatcccacaactataagataataaatttgctttgttttaagccacttagttcacggtaatttgttatagtaacaataggaaactaagataaaggtccttaacataaaaaagagttaccactttagacatgccacatgtccatcactggtcagtggcagggcttttccttatatagtcacttaagaactcaggtagacatagattctactatttgaaaagtcactggtcaccagagcaggaagaagaaagtatatggagaactcagacccattcttctatacttcagtctagatggtaacacatgtcacttctgttcattatcagttggccagaaagtcatataatcttgcaaactacagagagttgacaagtgtaacctcctatgagcctgaagggaaagaagaactggattttaatcagcactgaattcgacattttaatatctaccttagcctcatactagggagtccatgaaaatcttgagaaaaggtggaaagaaatgtttcttacctgatgggtctagattcctctctttcatagttccagatctgctcttgtgtgccagtgtgtgttgaaatgacctgctccttatgttaccagagcctatgttgttaactacagagaattctcagtatctgaaattcttcacatttagatgtcatgcaaagaatattaactctttctacagctctagttattgcaatgcaatacacaatcaatgaatttgaaaaatttgtttctccaaagttgcaaatacaaatcatgctgagccttgcatctctttatttctcagttttattgctttctttatcatatttgatgcatacttcagaacagcggaaagatataacccactttttcttttcatagatgacagcaaagtacaggtagggcaaaatctgaaaacagctcccaacacagttggacaccaaccctgctagagtactctagagaggatgcttaaccatgtcatgcaaattttttgtaatttttttgcatatgtaccttacaatattcacatttggctgtaatggcatagtatatgtaatgaaatgtgatagataagcaaaatctttttaaatatttccataaaagagagacaatattaaactattaacaactgaccactctatgatacatggactcctaagacaggccccattgatccctgcctcctatataatctcatacccttgtgtgatatctttcccttgagtatgccctggacttaatgacttgtttctaatgaattgaatgtaacaaaagtgatgggatgtcatttcagtccttaagttgcaaaagactgactttcctcttccttgcagattctctctctcttgctgtttttgatgaagcagactgctatgtagaagtggccaggtggcaagaaactgaggttagcctctggccaacagtcagcaggaaactgaggccctctgaccaagagcctgcaaggaattgaattatgccaacaaccaagtgagtgagcttgcaagtggatctttccacagttgatccttaaaattagacctcagccccagatgtcacaatgattgtagcctgtggaagatcctaagcagaaaatccaattaagttttacctacattcccagcccacagaaactgtgagatactcagtatgctgttttaagtcatttagtttggggtaatttattacatagcagcatataattaagacactagacattttgtttcttcgggatttttgtttttgtttttctttattttttatgttgttccaacatgtttgctttttcctcttttaataggttcaagaatagtgagaaaaaggaaaattaaagtgttggagtaaatggttttggcaataataaaatgtagattcaatttttttgatatttaagaatgaaattttgtaagagatatttatttttaaagggagctgctctagaatctagacattaatatgtccccaaaatgtgtttacagatttctccattcacacacacaaaatctaatttctaccttagtttacagaaatccaccctttgtgtaaggtgagttatacctaacagaagtttatcactttcttattaaagaactctatgtctttggtctcttcttcctaatgaatatcaacatttgaggagaaagatatataatcaggagggaaaagtgatctgaaataaagacttgaatattgttattagatttagactatgttaagatgaattgctctctcatggaaagactcaataacttatgcctaagaataatataataatcacaacgatagccatattgttgttttgaatttgggtaacagaagaacatagatctttaaactattaggcatatcttttctgctcaaaacaatttctttacattttatccctttaagtcctttaaagcttatcacacagaaaaaataacagtctgggagaggaagactaaagaaatcaactttcttcagagcacatatagatttattgtagccaattgatgacactgcaaaactggcacaaaggcaaatacttaataaataaatgaaaatcagagtggatcagttcagtgctgtatgttttgaaccgggtcctcaaaggcaagtcatcatcagaagaaagaaaaatgcatttaaggagcgttaattattgtctatctccaagaccaaaataaaaaaagcttaaaacttttagactgttaaaaatctactatactaggatattaaagtattttaaagaaaatgagatttatgcttaataaaaaaattcccattaaacagcaaactattagaagagaaaatcattctgaatctctacacttctcaatccaaatacaatgccatgagctataattcagtaaaaagctctatattttggatcctgaagcttgactcataattgaaaggaaaccctcctaattcatgattgcttgtctcacgtacattacagagtaacctttactgtagtttcaaagtttaagattttatttacagtagtttttgcgaggtcgtcaattgacacaatgtagttgctatttgtgaaagacaacaatttgaactgcaacttgaaatcaattggaaaccagtccagtctctagaggacacttgcaatatgcttcacggggctaaccccattaagcatcaaatgcagctacaaactcagcacactaaatgaagcttttctattgcacaagagaataacttcacatgaatgacaatttctgtaatgcttaggcttgacaaaatctttaaccttaagtgtaatactaatcaaaataattccaggaaatattgtttacacattatcatctggaactagctggtaaggattgagaagtttgtcaataattaggtgctctgacttttatataacttataagtagagttgtcaactctaaaatctggggagtttggtagctctgttaagttggggaaaatgtagatccccagcctcagtattctcatctctaatatgggaattctggaacaaatgatcctgtatcgatacactattgctgtacaacaaattaagcttaatggatgaagataaccacttattattttgtttcaactcagggactggctcagcagctctgctgctctgggccatgctcacctgctctcagctgggctcactcatgcatctgctatcagctggctggttaactgtagttagttcatcttgatggcatcattggggaaactcagctctctttcactggacttctcttatatttctccagcaaactggaaagggtgtgttctcgtggcaggggcaggagtctacaaaagaaagcagaaatgcagaaacacatttcaggcttctgcttgcatcagttccactaaaatcccattgttctcgtcatgtagccaacttagaataagaatggggaggtcactaccaaagggcatgaaatagaaaggcatgaggcatggaaaattagatccattagtataatcaccttacaataatcttaaagttgcttttctgcagataattgtttgagtataggttttttaaaagaggcatccaacacaaaatactggaaaatatactgtgagtgaggagggaatataagagaaagaaaatcaactacctcttctctgccaataagtctttgtgtaattagatatgaaaggcccacacttgaaaaaagatcagatatattttaattaaaagtgagtaccttacaactgactgatctacttttcatgcatttttctcttaacatttttctgtcaaagtttttcaaaatataataaccaaacaaggaaaatacaacagataactatgtttgatgaatgcctgattacatacattcattttcacttctcattctcattcgagtaagagcaaaagaaacatgaatggggagaaaaggggagtaatatagtatttttaaaaagaaagaatattaggggttttatttttacacatttcctttaatgcccatcagagacccattataatatcgaagggcatcttttgttcggtgtagttgtactgatagataatgaggagtaatctgaaccaagtacattgcactgtgatgtcatgcccaggaactgttttataaaccactactagataaaagacctcttcccttattgacttcttcttttaggactctagaggaaccctattaaatttcatcttcaaattctgcccatagacagtcttaaaattcaaggttataagtcatattcttgaccactggttaaatcacccagtaataaaaatgcatttcttccctgttttgaaggataaccctgagaactaaggtatggtaaaggacaaagctatgtaagcacatataaatcacagttatgtttttgcagtaggtcatgatatttctgcctccaacccctctcttcttttcctctgaggtagattctaaaactttgaacgaacacacttacagtgatgtttatacatttatactttacaaatcatttaaagtaatacagtattcaactctataattctaattttctaataattcctcaattgagttaaaagctatgaccaatttgactaatgcatgaaaaattaactgacttatcagaggtcacatcaatcaaccactctgccaagacaagaaatctcatagtttggctgttgaagcatttatttaactaatatccctagaggagtcaagctatagcagacctttacatattcaaaatgtcttgaaggctcatcttttaaaagttgtcttagtctgtatgggctgctataacaaaatgtcataaatggggtagcttatgagcaacagaaatttatttctcatagttctgaaggctgggaaatccaagatcaaggcactgacagatttgttgtctagtgtaggcccactttctggctcatcaatgacatcttgctatgcagtcacacggtggatggggtaagaaatctctctctggcatcttctggaagaactctaatcccatttgtgagggttcctcccccaagacctaatcatttcccaaaggccccaccttctaatacaatcaccttgggggtgaggatttcaacatatttggacataaatgtcagaccataacaaaaatcattttatattctatgtcataacgtgaccctgttaagatagcataaaggcatttggaatttctaatcttttattcccagtccacatgtaaactggcacaagaggaataagctgtaggctcatcctgtggtttcaataacccatatcccactgccatttgttccagcttgggaaacatgaccctaagccagtctgtgctgcactgtttgtattattccaacaatcaaagtttcattttttctatatttgtatcagtccattttcacactgctgataaggacataccagagactgggaagaaaaagaggattaattggacttacagttccacatggctgggaaggcctcagaatcatggtggaaggtgaaaggaacctcttacacggtggtggcaagagaaaatgtgaaggaagcaaaagtggaaacccccgataaacccgtcagatctcgtgaaactcactcactatcacaagaatagcacaggaaagaccagcccccatgattcaattacctccctgtgggtccctcccacaacacgtgggaattctgggagatataattcaagttgagatttgggtggggacacaggcagaccatatcattctgtatcattctgcccctggcccctccaaatctcacgtcctcacatctcaaaacgaatcatgccttcccagcagtcccccaaagtcttaactcatttcagcattaacccagaagtccacagtccaaagtctcatctgagacaagcaaatcccttccatctatgagcctgtaaaatcaaaagcaagctagttacttcctagatacaatgggggtacaggtattgggtaaatacagcaattccaagtgagagaaattggccagaacaaacgggttacagggcccctgctagtccaaaatccagcagggtagtcagattttaaagcttaaaagttactttttttgactcctgatctcacatccaggtcatgctgatgcaaggggtggattcccatggtgttgggcagctctgctcctgtgtctttgcagggtacagcccctcctcccagctgttttcatgggctggtgtttagagtttgttgcttttctaggcacatggtgcaagccatcagtaaatctaccattctggggtctgaaggatggtggtccttttcccagagttccactgggctgtgccctagtaaggactcggtgtgggggctcctaccccacattttccttccacactgctctagcagaggttctccatgagggccccactcctgcagcaaacttttgcctgggcatccaggcatttccatacatcttctgaaatctaggtgagggttcctaaacctcaatttttaacttctgtgcacgtgcaggctcaacaccacatggaagctgccaaggcttggggcttccaaccactgaagccacagcccgagctctacattggccccttttcaaccatggctggagcagtaggaaaacaggacaccaagtccccaggttgcacacctcatgggcaccctaggcctggcctggcctacagaatcactttttcctcctaggcctctgggcctgtgatgagagggactgccatgaaggtctccgacatgacctggagacattttcctcattatcttggggattaacattaggctcctggctccttatgcacatttctgcagctggattgaatttctccccagaaaatgggtttttcttttctatcacattgtcaggctgcaaattttctgaacatttatgctctacttcccttataaaactgaatacctttaacagtacccaagtcacctcttgaatgctttgctgcttagaaatttcttccatcagataccctaaatcatcgttcttgagtttaaagttccacaaatccctaggggaggggcaaaatgccaccagtctgtttgctaaaacataacaagagtcacctttgcttcagttcccaacaacttcctcatctcctcctctgagacagcctcagcctggaccttattgtcaatatctctatcaagcttttgttcaaagccattcaacaagtctctaggaagttccaaactttcccacattttcctgtcttcttctgagccctccaaactgtttcaacctctgcctgttacccagttccaaagttgcttccacatttttgggtatcttctcagcagtaccccactctcagtaccaatttactgtattagtccattttcacactgctgataaagacatacccaagactggtaagaaaaggaggtttaattgaatttacaactccatgtggccggggaggcctcagaatcatggcaggaggtgaaatgcacttcttacatggcagcagcaagagaaaatgaggaagaagcaaaagtggaaacccctgataaacccatcagatctcgtgaggcttattcactatcatggatagcacgggaaagaccagctcccatgattcaattaccgtcccctgggtccctcccacaacatgtgggaattctgggagatacaattcaagttgagatttgaatggggacacagccaaaccatatcaatgttaaaacaaaatcctaacataattttttgtcttacatattgaacttggaattcctggctttttatttacttggaacttcaaaaattgttatagatataccacttttttttttctgtcaggacctaattcttattttaaaaagttacatgatgtcagtttcaatttctcttgagatttcacttggataacacagactatcacaattttgcctctaattcactctctggtgaattgctctgctctatcattaaggttttgagcctacctttataaaatgggcacaaaaaggaagtaaaaattatggttcttacattcacttcttatgcatgtaagaaaggatagaaagataatttggagctatattacaaaatgagtcagaatctgcctactagttctggaggtctttcacaaactctcaaattcttgggaaaacacagcactcttttaaaatgtcatgttacatggccattcactgcctattatactactacactcaagcccatgatttcagaaagtccctctcaaaaggaggttcagagtgcaactagatttttataactaccatttaaatcatcaatatagaatatgcttctttgctcttaatttacttttcatttctatttggtggggagttcatcattaaaatcctccctggaaggtttgcaaagatagaactttggttgaggatggaggcagaggcagcactggccaatccagactgcagggatcactttacaggtcttgagaaaaaatagtggtaggaagggaagtaagcaggagagaggaattaactaaagagaagtaaaacgtgtcttgtttaaactagtggaagcaatgaaaatttagcagccattgtttgtctctttattccttatttataaaactaaagagtaaactatatttttaggttaggttttaatttatgggaaagggaaagaaacctaaaagaagccccctgctggccactctaatttctgccctatttgctccttaaaaaaaataaaaataaaaatatccttacctttcctatattttcctacatttaagacataatttaaccttttattgttaactgagatttatcattgttataaatgcaatatacaaatataaatctctaaaggcatttcagtaatttgtcttttatgacaagaagaaaatcatcctttgaaagatatgtatcttgttttaaatttgcatttaaaagtctatcactagtagattagttttgttattttgctcttaatctgagcacaaaataagtttgttttgattatctcaaactctgggaggtctttaaaattaaataacaaatccgagttttattcaaaattatttacaacagtcttttgtcttattctagaaaattaaggggactacacatagcaaaaatcccgaggctgtgtttgtttcacgctgttacttgaatctatgatgaaatcatttcctaggcttattctttagaaaataaaactccttagggcagactgacccgagttgcacaggaatgtaaataaaaatgattatttctctctttacataagacaaatattttactacattgtgtactataataatctttctcatggccaacacagaaatattagcatctaccaaatatggttaaatcctcaaagcctacttataaagcaaaagcagcactggaaattgacatcacttacatttagtcacattttcaaaagagcatgattaatgaaacagaagtgttctcatggagcgtgtgcaccatgtgctagtgacagttatatcagaacgaactacatgtagcatttatcttccttttgctctggtatctcccgagtgaaacgcttgggtgtgtatgaaaagcatagggagaatgacaactcatttggtattgacttggcctttgtcccagctctctcttacatcatcaaccccttcctcatctctgctgtcactgactttgagaaagcacatggttcagccatttgacatcctctctgtaagaccagggatgagtctgctatgcgtagctctgtttattaaaacctcaattttaagaaggttaccattctacataaaacccttgacctctcagagttagtggtatgagcctaaaagttgccaggacatgctaaacttttcctgagaaagagtccagtcaacaattttatgacaatccttctgacctgagctttgcttaataccatcaaataagtcacaggacagtcaggagattggaaatgtatcacttgatgaggtttttcagattgataacacgagggtaagcaactgtgtcatccaggaggctccaaagtccagggtccattcagggccaactacagcagtgccccttcctaagtccaggccattcacaccaaccgaagcccagcagggggcagcttcccaaagctaaatctaaaaagaccatagccagcccagctgaaagtcccaggaaaaggcaatgttgcctaacagtcatgagacagctggaaaagtccctgcacctgacacacactgttacagacagtgctgcctcatagacgtgtagaaggcacatcagggagagtgtcggggtcaggccagaaacttcacattaaatcagggaggatttgtttggggctcacatttagacagagaacaaagacttctctgtcatttttgtagttttgttcatttgtatttgaaaatagcagttctctctctggcctgactgcatccctttgatggtaactgaagctttccattgcagcggtgctcctgacgggggcgacattgaacctgctcagggctcagggctcctcttcccggctctgtggcctccccgaacatgagtaacactatggcctgcaaagataggacttaattgtccttaaaaggaaaaatgcctgcatgaccagagttggaccaagccagaacaggagcccctgagaagtgctaggtacatttttaacagttcctgtttactttccataggagattatgagaagaacacaagagcacatttataagtagttttcatgattcatgttatcactgaaaccagatgctattctgaatcaaacaaccctgaagtgatgtgcaattctaatatctgcttaattaatcaaaatattcattaatacgtaagaaaacacattctgtttgtgttttagagtacacatttatcacatgctcataaatacttaaatacaggaggtatgcttggcagataaattattaacttttcagagatctgcagattttagaaagttttggggggaaattaaattttaataaaacagcattttacttaattacagaaaaatcaaataaaattattttctagattctgaaagaaaaacaaatagattataaactgtaaatgccctttgtcttatgataaccttgctagctttagtaattgtataatattatgaaccttgggaaacagtgcaaagcatcaaaaatcttatattaacatatatattgactctaataaacctatatctgtattagtgtttaatattgattaaaattgcttataagtttatattaataggaaatacatcctgatttagtaggattttaataactacaatcatgtattgcttaacgatgggaatatgttctgataaatgcatcagtaggcaatttcatcatgtgaacatcaatatcatggtgtacttacacaaacctagatggtatagcctactgcttctaaactacatacctgtacagcatgttactgtatgtagatgactgtaacacaatggaaagtatttatgcatctcaacatagaaaagatacggtaaaaatatggtattataatcttatggaaccatcatcatatatgcagtctattcactaaaatgtcattttgcgtgataagggcatttactccaatattgctttattagattggcatccttgctgactcaagaccctttccttatgtactgatgaccacctattgattctcagaaagtcttatattctcactcttgtgccaccctcagttatttccctctgcctttcacagctaactgtccacttcacaccactaatcaactgctgtgaacttggcttttaccttgatctcagctcttccaaaagtcaccaatcatttcctaaatgcaaaatataatgaccttttccctgtgtccatcatactttgtataacatttgatattgtaatgagttgaattgagtccctctcaaaaaagacaagttgaaatcctaaccttcagtatctcagaatgtgaccttatttggacacagagttgtggcagatgtaattagtgatgaaatgaggtcatactggagcagagttagcccctgatccaatattactggcatccttctaagaagatggccatctgaaaacatatacacagagaggacacactgtgacaatgaaggcagagattggaattaggaagttgcaagccaaggagcatcgcagattgccaggaaaccaccagaggttaagaagggggcaaggaagaatctctcagaaacgtaagagagactgtggccctggtgatgccttgatttcagacttctagcctccagaactgtgatgtgatcaatttctttgattttaggcagtttatggtgcttcattatggcagccctaggaaactgatagttactactgaccaaggctttattctgcacttaccacaattttttaaatgctcttgtccacagggttccatacaccatatttttccagaagcctggctacagatttcataggatcacaggattctttactgcctctcatctcctatttccttttttttttccaacaggatttaactctgtgttgcccaggctggagtgcagtggcacagttataggttcactgcagcctctccatctcctgggctcaagtgatcattttccctcaggtgcccaagaagctagaactacaggcgtgcatcaccacacccagctaatttttattttttcatacagataaggtctcgctttgttgcccaggcttgtctctaactcctggcctcaagggatcatcctgcctcagcctaccaaagtgttggagatacaggcatgcaccagcatgcccagcctgatattccttgaaatacctcaagccatcctgtagtatcaactaccacaaatatgtgagggctgctccagttcatatctacatcttgaacctctctaagtctccatgggtcaacctcctgtgttttcctgcagcacaccaaagtgtgctcaaaaaagcaaatgaaaaagaatacaaaacagttgatactcacttgcaaaataaaaccagatgcagctttctttacaaattgagaaagatgttttttaagcataatgactagtgttggcaaatgaacttgtccctctcaaatatcatgtgagactttggtttgatacaattttactggagagttatttagcaatgtgaatcaagtatttaagaattgttaattccttttgacctagtaattttactccttaggaattatcccaagaaaataatcagacctgcaccaaagatttatatatggatacatatacaaagcacatatttgcatataaggactacacccacagatccataaccgtaaagtctcaaagttactgactgttggcttttaaacttttaaacttttaaacacagatacatatctctgagtctagtctttatatgcaaatatatatgttttatatatgtatattttttgaatcattttatgtggtttatatttattcaatttttatatgcttggtttagaagcatataaaatgttcacttttcagaaaacattaggaattggttatattttagaaagaaacgtagaatatcacatttcaatttggactagcacttttcaagcggctgctaaccacatgtggatagtggctatcctatcagcatagagctacacgaagggcatatgactgcttattttactatgcttgcaatttctgtagctttgattttttttaaataaaatgttggccaggcacggtggttatgcctgtaatccgagcacttttggaggctgaggtgagctgattacctgagatcaggagttcgagaccaacctggccaacatggtgaaaccccgtctctactaaaaatccaaaaaaattagccaggcgtggtggcaagtgcctgtaatcccagctactcgggaggctgaggcaggagaatcacttgaatccgggaggcagaggttgcagtgagctgagatcacgccattgcactccagcctgggtgacaaaacccagactccttctcaaaaaaaaaaagttgggggaggaaaggcctttgaaaacacttgcaatcacattcattctgcttcagactgtttactcttcttaatccctgctaaccatggttaattcactagcatttttgcttttcaagcagtgacatccacaagaccatattgtgatctttctattctttgcatagtttcatggttcttagaggaaaaaaaaagatgtcacacataacaaacaaactaaccagtagtgacactaaaatgagaaaagggttttggcatggctcaaaaaagccatgtgtataatttttaaatcagtgctgcaatttgtggcccagcaagtgagacggcattttgcttcctcctcaagaaccctttgttcttgtcatgaaccagaatttaagcttctgcactctgtttctgggaggcagagtcctctttgacctgatctgtctcctttgacaaggagacagattttagcttgtccaaaaaaagataacccctgctgctccttgtttggaaaaaacacattctccttcctgggagaggctgaaagaagaattgactacaaaagagaatgtaacaagtcttcattttcaactcatttccctttaatttttatgccaagtacagccgtgccttgagtgatgtggcaacaggctgaatttccccttctttctcagattgtctcttattttgacaacggcctcctttcgttaataagaagtcaatgacatgttcctctgttttcttaacaaaaatctgcactgcttgtggataggatggtcacataatttcgcagtccacaatgctggggactaggggataggaaaaaacgtagagaagcatgttttaccgggaagaaaatagtagcaatgcagctaccctaacttgaatggaacaaagctaatacttgtacttcttgttcctttcaaatgcctttcttgaatacctaagttctcatagtcctggagaatcttgagaaacaataaaactttgtgattgttttagaacttcaaaacttctgcacaggattgacttgaaatatcagagaggttcttgtggaagaggatgtgagggtatctttttaagccagctgtcactacatagccagacttttaagataaaatgctaaggaaaaaaaaaacttattttagctcctcaaaagaaggaaggaaaagaaaggaagaaatgaaggaagggagggagggacagagagggagggagggtaggggtgaaaaaaaacactttgctgcagttcacaaaaatttgattaagtgtaatgaaaactttaatttgttgataaaagcactcagttattaagtccttttaactttactcatatttcccaccataaatatgtaacatgtatgtatatgtatttatttccaaacttgaagtttaaaggcaatctctataccctctccatatgcattctttaaaatcaaatataacaaaatatttattcagatgttttctcttcttcaatcttcagtgaaggaaaatataattttctttcttcagcagagattgcacagtggctttaatcaaatcaatccatttcaccactagatatagaatattttccctaagggccacaaaaagtcgaagttgatttgtctttgtcaaagcagataagttgttaaatgaaagaaacagtaccagaatccttccaactaactgaactaggagagaggaataaaggagatgaactctacgtgcaaacatacatataatttcttttttcctcatctgtctcttgctctgtttcccccagttccatctgcaatagcagccatacagcacctagactgttgagagatactgaaacttgaaagaaaagggaatgtacaatgtgcaaatgcaatatcattattcaataactttgcaagtaattttattacctgagacaccatggtttctttgtctcctttttctgtgtcccattctctgcctctagctgtgggtctgtctctctcctacacatacatactcacctagaggggcatacatattaataatgtgtgggaatttcttacttaaagctacttcctcttcaaaccaagaatagcagaatacctggatccaataaacaaatgatcttgtctcgacatctaaaataaattatctggcagaacactgtaaatgaatacttaatagcaaaacttaataataagggaacacacaaagaagtgcaagagtaggaagctttcttgtatcacttcctcatgccaaaaacagaactggaaattgtcactcaaaaaaaaaacttttaaaatatagtagttcaagtttcaaacgtggtcccaacaaatcagatatacaactgtaatctcagttctttattctatacaccaactttagatatcttcccataagtcttaaagtgatttttgaatacaaatatttttctcccttcaggctaagccctatgggcgagtgcagaactcgtacaactggttctactaccaaactataaaatgttcattccctatttttcacataagaagaaagcaactttctccttttttctcattctcattttagcctgaacacctggctttttctgaagctatgccaggttcagatcagatactatgagggcagcaatgactacgggttactgcacacactatctccatggtttctactgtgaaatccctttaaactttctatctggactattttcatgtgctgtgtatgcgtgagcacctctggaggttattaagtagttgtttcatcaataaatgttggtgatgcttatctctatatttctctggattctagcatgcaagacttttgagatgacctactgagataaagatctaagtgacaagcattaaagagaaaagacacaatttgattggaaaaggcttaagaaaatacggaggttactttctgcaatacgtgtagagggtaactgttctccagtgcttatctttgaactcttattaatttagtgtttgattcactatagtgaacaaaactgttctttaccttgaatcaaacacaaagaatgtagaattcattacctggcgatatcctatcagttcagaatactccataaagtctctacatttgaaaaaaggtgggtgcaaatgtctggttctattttttaatgctttcatttcacttttatgtatgagaagtgtgaacatctctctgtggtacaactcctatctccatactgttttctccacccttgacctacttctctttcattattttcccattctaacaattcctctccccttcaaatatctcatgaacaaggctaattttcagtctcatcaccaaccctggcttgaatgctcttgcagttttttctagtaaaatcaagtagccatttatattaattaggtaggctaaactactaaagtaaatattccccaaaatgtaatggctcagataaaatagaagcagatttgtctctaaagtaacagtctaagctggaggttcaggtcagtgtgtgtgtgtgtgtgtgtgtgtgtgtgtgtgtgttttgggatgctggggagttgggatttgggggaggctgtgctctacttgggaacccaacctagaatgaggttagtgctgccatcttcaatacgtggcttctaaggtctctctcgtcatcactatttcagtccatgggaaggaaaaaagagctataggagagagcatgtgaactttcaaagaaaggtgtgaatgacggacatcacttttgctcacatttcactggagcttatttagtctcatggccacacctaactgcagagggagcaggaaaacagtctgtggctaggcagctgtgtcccagttgtgattctaccttactgtggaataagtagggcacagatcactaccacaccctttaagcactgttatagtcttagtaagaacataaagataaaatataggtccaataatcagttgtcctgggttctttgcagaacaaactattccaagagcttacattagccatttccaatgggaacgcattataaaagcctaatgaagtattagggtactcctatgacctattatatatttctgtttcacagaggtaggataagaaatatatacgatatatattatataaatatatcagaaatgtattatatatatttaatatatatttcttgatataatatatctataatgtatctagaaatatatattaaatatatctaattattatatatttagatatatttatatattatataaattatatttctatatgtaatattttaaaatatattaaatatatatttcttatatataaacaatatgtttctacataatatatctataatatatcagaatacatttaatatttctataatttaatatatgttttatgtttatgatatagaaatttcatacattatatatctgtgatgtagatatatataatagatatagaaatatacattaaataggccgagcacggtggctcacgcctgtaatcccagcactttgagatgctgaggtgggaggatcacaaggtcaggagatcaagaccttcttggccaaaatggtgaaaccctgtctctactaaaaatacaaaaattagctggatgtgatcatgggcgcctgtaatcccagctactttggaggctgaggcaggagaatcgcttgaacccgggaggcagaggttgcagtgagccaaggttgtgccactgcactccagcctggtgacagagctagactccatctcaaaaaaaaaaaacaagaaaaaagaaatatatattaaatataatttttgtttttatatataaatatatattatatatagaaatgtattaaatatatattatacacacacacaccatttggaaaggctaaaatcattatgtagttgcatagtgttagaaaccaaattgaaggagtctttcactgctaaatataagaaggatttagtttaggcctatgaagccagtgcccaacatttccataatcaaataaaagataatgactaacagggaaactgagaaggcaatcagccctcagatagagtgcaaacagacaatattcataagtaagaatagaacatatgtcctagttaagctggcaccccttttttaataatgggtctctaaaataaaggcagagttagcaatatagacagaaaatttcatttgaccattcagagccatggctcaaaaacatcaaaactgactaccattctggtagcatcactgaagtttgaagatcaatgaagtttgaaggcaaaacctaggaggaaagcctggagtatgtttagaccttcaatgactaaactcttgatacagaatgctaagaagacttttgtctaaggagtacagccaaataaaagtaggaagacaagagacagagcaagaccctttcactgagatcagacagaaatacagatcatagcaggctacaataagctgtctagacccaattttttaagaatagtgaaagaggggtagggaactctctgcccaatcctgtctcacaaccctgatcaatactctgatatgtcatgtaaagaggtcagccaggttaggtaatggaggtctcctgacccattgaccttgttttggcattagacattcaactttttgccattaaatgtcagatcaattcccaatgatttgaacattacccagaagtctttggcttcctggaatctttaatgaaaaaaaaatacaaacactaccatttccaagagcctaatgaattattattcatcacattagcttaatccatttcccttgctcaatttttaatattcttgtttcagctggatttcagcatttataatgcacatgtgtgtttttttatctatgtaattttcagtgtaggtttatatctatcttttttgtacatgaataatctttccttctcagagtcttataacttaccataaactgtctgttttctcctatagtccttaccagaattaccctgatattacaattatagatgaaaaggtttttctctgtttaggtcaaggaaggctgtgtttatcgtttattctatatgatatcttgcattcagtagacattcatacacaagttagtaaaatttgggcccagctgtactcccttcaacttgatgtggtcaaggggaaacaaaagggaggcccatacatacagctactgtaaatttatagggtatacaaattttccccttaggaataaggtgggccagtctctttggacctcccaaagaagaatcaagtctggttttcaaatgaaagcttcagagtatgaagcaatatttcacaaattattagagctttttaagggcatgccctctgcctagcagtactggataaacaggtatttagcagcaataaatcctaactcatctttttatatctcagggatcaccaagagtttcctgtttccagagactggcacatctttttgatgggcatgatacatgttatttgaatgactgattgaatgaataaatgagccaacaattgccatccctagataccaacaaatttccaactggcatctgcctgcttgttagtgtcatttccattaggtgtgacaagttgtaacctaaaataacacctcattgagacactagttcactttcaggactgctggggacaaggaagggagaagactacagctccttgcacaaccagcctcccactcccattgtacctgctatacaattgttgctattttggctgccaaagctccattaagagctctggagctcctggcatttgcagggatactccactaaatttaagccccaaagatgacttattcttgccagctgggtgcatcaaaccaaaggaacaataccagacaaatatatagagatctacttcataaatatatagaagatggaaacagagaaaacgggctttttgctggtgtaatttttgctaattttttttttcagttttaccatcaattcaaatgttcatgccaaaagaggtaatattgccagggaaaacaggcaactgcagagaattcatcagtgttggctgcttctggaggcgaggtcttggcttcacagtggagttggggttatggccttatcccagtttgggggtatagttagttagagtcagcaaaggctacttactgcacactgctcctccacttatcttgggtggggctgggccagttcagaaacagggcaaggtactaggctgtcccttcccagcactctgatcctcccaccttcatgggggattattggccctgacttaatgaaagtcctcactgcagacaattcacatactgaattatttggcactggctctctgagttgtacttaactttctgttctttcattgccttgaggtacaaattatttttaaaaagaaaaataagtaaataaaaaaaatagattcatcattattgccctgaattgagccacctggaatttgttttagttcatcactgagaagagcaacataaaccttatgactttttttaatttcataagtgcaacatatttgcattgtgatgtttttcattgcagggctcactggcagacaaaactcagcgctttatttcctttgtagatgttgatgcaggtaagtggcattgggacagtatgacgtgtttcatgatgacagtcacgctctgcttggtgacctctgacctccctcttcaggggctctggaggttaacatttttgtacatccacaccggaaagaatgtactcaagagtagaaaatgtgggaggaatttagtgaatgaatagaacttagcgggcagagaaaataactaggtaattttgtccaccaaaaaccccaattaccagttatttacagcccactggtctgcaacttcggttgcctaatcagacattcatataagtgcagtcccttgctcaaacagtaatcccttgtcttgactgactctcagacaaggaagagcaggcagaggagattgtaaagcagaagcaaagtagttgaaagccactgagagtggttgaggacatgggtgggttcacatctgtaatgtgttggaagctgaatacagctgtttggcactttcaacaggcagtgaccatgaatgggatgtcctgcctccagggcagtgcaaacaggcctccagccagacagccatctcgctctccttttcctccagctgtgtctgcagaagggtcccgagtagcatcctgtagttccaacctgcttactccttaggactaggaaacaagaaaatcactgctaaccccactccaaacttgcctgatttcagagctcagtatcattctgcagtttgcagtcacactgggagggtctttttctcgtatatgagaaggaggacagaatgttggaagggaacgctcctcgacagatgggaatgagagtggtgtgagtaactaactggaggcaataaaggtgttagcaaacagcaggagggaagagtgggccccaccgatcactggctgtcccgcatgctgtgtgttgtaccagtgccagtgggagctgcctatccaagccttggtattaacagcatgtgactctggcagattcacaatgtcctcattggctttgtcagtatgacaagctttgactgagtccctatccaactgaggggccaccatccccgtcaccctcctttctgatgccttttctcctgatcatcccttcttcttccttcttctttgtctggcttcttttgttcttcctttttctgtccctcactcctccttacattatattcccagcttcctttgggatttttgttttaacataaggagaaccttaccatcgatgtcaagctcagcatgatataaccaattaccctaaaaccacagccatctagccttatcttgtattaaaaaaaaaaaaaagaaaaaaaaacagatgttgcctataattgtatatctgctcaggtttaaacataaattgcagtgagaattcttaaggcaagaataccattgaaccaaaatacgttataacagaaaggggtctcagatgcttattacctcctcccaactgtatttcattttacaacaaagcaaatcacagcttggaaaagttaaatgagttcctaaggttccacaataaataagggcgaaggggccactacttaggacccagatctcctgatccctatctagtgattttttttacttcatgaattttaatgtaaaaaaagaaaaagaagccacagatcctctagacccttatgcaatatagggaaatattccttaaccccaatcgtgctttaatccttcttctactgaaacaaatacagctaatgaattagagatgctcttttgttctcctgttaactatctgaccttaaggaagtcactcaaccaattggttctcagtattctctttccacactgagggaagtggacagataatctatggttgcttccagctccaaaattcagtgaccctttaagcttaacttctttcaccagaatacctgtcatttctaggtaaatagtgttctcagtcctttctgttaaaagaggttaagtaaataaaaaggaaagatcaggctatgcttttggcctagattataactttgtgaccaaggatgaaggaatttaatagcaataagaaagcttccagggtctaccatttacaatttaaatactttacttgggaggttaaaagttcaaagttgagtcacagtctgaggtggctctgctcttcctttttaattatctgaggtcaggaagttaataatacgagaaatccccagcggagacctcttgtgcactgtgtgaactttaaacttgctcatttttttcttaagggtaaaaagttcagcagaaacacagtggacttttcctcttagcctccacccattcatcccccaaggtcaaaagttgaactgtaaaacagaaacccttgttctctgatccacatttaaacagatcacttattaaaaggtaaacattccacatgcaagccaaagttccaagtgaatctgctcaataaaaataaaaaaactgtaataaagtctttgatcttttccacttgtcttagaattgaacaacagaatttattttctcgttttttgaatctcagagaaggggcagtcatataagctctttcctcacctacctctgccctgagattggcatatctaaaagagataaacctaagatattttaaaatagtcagatttggagccttaccttaaggcaatttcttcaactaattctacgccatttatgtttgtttatttgttttgctcaaacaggaattcaagaacagcaaatgtgatttaaatcagagatataaagtactacagaataaaaaggagtttgctgaaaatggtagaggatgctgtattagtccgttttgctgctgataaagacatatctgagactgggcaatttacaaaagaaagaggtttagtggacttacagttccacttggctggggaagcctcacaatcatggtggaaggtgataggcatgtctcatatggatggcacaggcaaaaaaaaaaaaatgcttgggcagggaaacttcctcttataaaaccatcggatctcgtgagacttatttactatcatgagaacagcatgggaaagacctcccaccaggtccccccgacccaccacaacacgtgggaatttaatatgagatttgggtggggacaaaaccaaaccatatcagatgcagagaaaataaagaaatggatgaatatatccaatgaacctcatatgaataatgaatggaaaatatctgagatcttcacagtgttaaagctcaaacaagaagtgaaataaatagctacagagctccaaataagtatttaatgatagtgacaagactcactttcttgaagtaatgatggcaaactttaaaagtatggaaaagccattgaccgaatactaacccaatccaatcagcatgcttaggaaaactccctgagatgatcacatgaagctgttatttcatgcaacccatgtgtccgtttttttcaatgtgtacttattggaaatgctttcacttgtttaaacaagtcctacctgtgactcaatatttgtttaaaaactttttaagaaagcatctttgtcaccgtttatctatctaaatgcgaataataccacttgcttcccaccttaataatttttgtaaagattctcattagagaatacttaagcacagaaaacggtaagagccttgaaattaagatatacaatgaacacgtttataataaatacttttcactgatgtcagtttcgacagtgtcatttaagtttaaacgactttgtgatcacttctaacacaaatcaaaactagaagatatggctctaagtaagttgtgttctagatccatttacactgtgagtaacattcacgacaccctctgggactcctggatgcagctggtgacccagacccaggaatgacacagccaggaaggaagtgaggaaggtgcacagagctacttcctcttgttagaactcccctctcaacagctgtaaggaagaatggaaattccctatgaatcaaagtgtgacttcgaagtatgggatacaatttgagagacctgatcatattgattaggatgttgaccaaaaggaagtcactgcatttcatttggacactactcagacatttaagctggtatgacattcatgagaaacttctggtttcaattcatctttttcccatgaatatttatgttccttttttttaatctttaagtcagttcatgatattcaagctagttatttccaaccttctgtctgactgaattctgtattaaatctttctttgtttcccccctgcaaaacaggttaattcatgagaggctattatatagcaaggaccatgctgccatgctgtctgtgttctgggcatatgtaccctcaaagtcctcataggatagaaatagtactaaatctgtatacaatgaactggacacaacaatgtggggactatactacaaatactatgaacaaagtgccgggagaaccctgagtctttgccatgttctttgatgcctttgtgccttacacattctgatcccgccacctaaaataatcctcttgtccttcatccctgggaccctgtactctgcctcagtgcttctcttcctacacacttcacctccccttgcctctctgaatgtaagtgtctcttccacagcaatctgtgcaaagactaacaccagagtaactatcttacagtattgtaacacttagctaatttttctgcctccaacaataaattctgatctatttgaggaagtgaactccaataccattctcaaggaagtccttttttagaaatatagactgaaacctgacagaaaagggattcagtgtatatcctaaaggatggcataggagagctgagacttagcagggtatacactagagtggtctcatgctcttcttgccagcacaccactaggttagcagttctcaactttggctgtagttggtataacctggaagctttaagatatttttgatgtctaggtctcagttctagaaattttgaattcactggaatggagtagatttgggtcattaaggtttttaactgttcccaggtgatactggggatgatgagaacttaaggatgagaatcaatgcacagcaagacactgtgaaatgggaatagatgttagaagccaccattggcactaggggtcacaaatggattgccaatttaagaataccttatttttcataattctcttaaggaataagttttcttccacctgaactgtttcagcagttctattatcctcatgataatatgagctttcttagcatattacaccaacgtctctgtaaaatcaaccaatctttttctttatcttcattaatatcttgtgtgctgaatcatgtaaaactgcttcctattgcctaagtgtgtcatgcaaacctttccccataccatcctatatatctgcttccaggaatgcctttcctcttaatcccccaggaattcatactcacactttaagacctggagccagacatagtagctcatgcctataatggcactgactcaggaagatcacttgaggcttggagtttgagaccagcctgataaacatagcaagatcctgtctctaaaaaaacaaaaacaaccccgtctctactaaaaatacaaaaacattagctgggcatagtggtgggtgcctgtcgtcccagctactcgggaggctgaggcaggagaatggcatgaacccgggaggcagagcttgcagtgagccgagattgtgccactgcactccagcctgcgtaacagagcaaaactccgtctcaaaaataaataaataaataaacaaatataaaaataaaaaataaaaaacaactgagcatagtggcttgcagttgtagttccagctacttgggaagctgaggcaggaagattgcttgagctcagaagtttgaggtgcaagtcagccatgacggtattactgcactccaacctgggcaacagagcaagactctgactctaaaaaaaaaggaagaaagcaaagacccttcttaggcttgtctttttactcctgttctgtgatgcatacaacttggtttaccattcaatttcaatcaaaacagttaacacattgctatctctttgccacttactgtcttgttctgtttaggctgctgtaacaaaataccataaactgtgtagcttataaacaacagaaatttatttctcacagttctggagtctgggaagttcaaaatcaaggtgccagcagattccatgtctagggaaggctggtttcctgatccatggatcataccttctctctgtatactcacatggtggaagggccaagggatctctctcagggctcttttataagggcactagttccattcatgaagactccaccctcatgacttaatcacatcccaaaggccctacctcctaataccatcaccttgggtattaggatttcaacatatgagtaaattttgagaaaacacaaatattcaagccatagcacttctcttgaatttttttgaaattcccaagggcagaaaatgtctttttctggacatgctaattccagtatgcatactgtatttgattcatgggaggtgctaaatgaacgactattgaataaatggatggaaggatggatagagggacagatagaaagaggattatgtaaattaattccttcatctatttatcacttacggggattctcactatactcatcattgaggaaagagaatgacttcctcttatgcatctttaagaagttatgaggcccaggagcctgagccaattacacataattagggactccaggccaggggagggagggtgcccaggaaaaacagtgacaatcatgatttccttggtcatgttaagattttctagataaataaatagaagcaaaacattctagtcaagttgtgtctcaaaatgctaactttctagatgattgcttagccctgagccaagtctccttttgctcttccctcccgtttgtcacattggccttgaggtcttcttcagagaatcataatcagcataaaagaatgtgctccggctgggcgcggtggctcacgcttgtaatcccagcattttgggagtctgaggcagatggattgcctgaggtcaggagttcaagaccagcctgactgacatagtgaaaccccatctctactaaaaaaaagtacaaaaattagctgggcatggtggtgggtgcctgtaatcccagctactagggaggctgaggcaggagaatcatgtgaacctgggaggcggaggttccagtaagccaagaccggaccattgtactccagaccggcaacaagatcaaaactccatctcaaaaaaaaaaaaaaaaaaaaagaaagaaaagaaaaaagaagaagaagaatttgcaatttgctcctcctctctcgatttgagttccagctggaatttgaaaaaaaaattatgggttcataggtttgttcgtgctaaaaggaattttaggcaccatctcatcgtgtccctacatcttacagatctagaagcacttgggaaaagtttggcaaatgcatagtctatggcagttaccagtgtagctagatggttctgggccacatcagcatgggaaggccaatgaaatcacatcaaccttagcacccagatcttccaggaattgggcccttcttaaggtcttctgtacttccaggaagtctcaagaggaaagctcatgtgtactcagaaataagccctggcctctttgtccctggcctcttcctcaaagaccccctcaccaagtccctggtctgggtccctctctgagaatagtccaccctgagtaccactatcctctgtggtcagctctagagctccaaggctgaggacactagtcctcctacaggggtggaagagataagggagtgggaggaagggaagggaggtggagaaagaaaggtattgaaaagcataggaagaaagcaatcttcctccagctttcaagcagcactttgttactggtgggtcagacataacttggtgttttcgaatttggctctaaaattaggtccagatttcaaatttgtccctgctacttagcatctttttgatttttagcaacatagaaaacctttctgaacttgaatttttactttttcccttctttaatataatggaaatgataattctgtcctcataaaattattgttagcattaaatggaatactgtattgttataccagtgactgagcagagtgccagaagttagtaagcactcaacaaatgatatggatattattattttcgtctccattgttctcatcactactagtttaattgttcattgacatagctccttcagcttctgctcctaaccctgctctcaattgttttcaatgggagtaactcaggccagctggaagaaatcaatgcctccccaacctctttgtttcctacccccatttccagatacctgtatataaaacttctttttttctccgtttcttcacaagacagtttgggaaccaattggtacaaagagttccttacaaagccatttttaactccattagcgggtcagctaggacatcccagctgctttactagtaaagtccatctgtccttctgaaataatggcagatgtaattgccacttttcattacaggaaaacaacaaatacacattttggtagcttgatttcccccaaaggagctcttgcctttccagtaatagagttctagctagacacacggttggccgaagacaatccttcccaccttcaaccatgcagatgagagcaataccccaaaactgagcagagcaagatgatgaaaagaaccccaagccaaaataactttgtaattatccatccagtaactctgataggtctggactgtttcaacaactatatttagacctctgtgttcaccctatagcctaaataccaggtggtgtcgtttctaaacactgcaaagagaaagttttgtttagacatcaatgcaacccccaaagacaatatttaattaaaatattaatactggtcatatgcccacaaagtagctgggaaagcaagcaccctttcattcccaatatagaagcctcaggccgggcgcggtggctcacgcctgtaatcccagcactttgggaggccgaggcgggtggatcatgaggtcaggagatcgagaccatcctggctaacaaggtgaaaccccgtctctactaaaaatacaaaaaattagccgggcgcggtggcgggcgcctgtagtcccagctactcgggaggctgaggcaggagaatggcgtgaacccgggaagcggagcttgcagtgagccgagattgcgccactgcagtccgcagtccgacctgggcgacagagcgagactccgtctcaaaaaaaaaaaaaaaaaaaaaaaaaaaaaaaaaaaaaagaagcctcaaagttggtattggaaaagatttcaaagtttctaacacagacaaatattaaacattcatggtcactgttatgaactgaatgcttgtatccctccaaaattcatatgttgaaaccctaactcccaattttatggcattaggaggtgagggcagagctactatgatgggagtaatgaccttataagaagaggagacatcagagtttgctctctctgccacgtaaaaatgcaacaagaagacagccttctgcaaaccaggaagagggccctcatcaagaaccaaatctgttggcaccttgacctagcacttcatagcctccagaactatgagaaatgaatgtctgttgtttaagccaaacagtctatgtattttattatagcagcgtgagctgactaatatagtcatccttagcatctaaaccttctattaactgaagaaagaaaaaccaactcaaggcagggaaactttatgctttatatagacggcaactttaaagagcaattgtttaagttacattttaattgcaaatggatgtattctaattcattctctgagcaaattatgggtcttcacatcagataaagaagctctatatggaaagaggtagagaaagtgccccaaaacttattggcctcgtagtcccaaccacaggcaagagaaattattagctcagctttggggcaagattagacagccccacctcagttcaggtcacctccaatctgatttcctaagaaagctcacagtatgctaagaacctagtcacacatccaagccaattttgggattagcctagacctgtagtccagactgatagcctcgattttatatttttgatgatatagacggtcaaatatacataattatttttttattatattatataacgtaattatgtatacttgactatgtacattttatgaaatcagaatccatggattgtccccataatgattgtccctccagggaataagttttaagattcagattaatccatttggggcatctaaaaacgctcaacaccctattctttcactctacccatgctggaataagaccaacttcaagattcaggacacatggctccatgtaaccagagatcccatgccaagggacagtaggcaaaaatagacacaggtggatatgtatgacttctttccatgagcttccaggcctccaagggacaaaattcttgatttggtgccaaaatgttctatttgtcttattagaaaaaattactcagtaaggtgatataccccaggaggagagaactgttctcacattatccaaataattatttaagtctatacattttcactgagggttttaatgatgaaattattaagacgttgtatgaggtgagctgtcttagaaaaatttgctgcctattaatggctttcccatgcattatttttgctttcatgtcttctaagtctaaaagcttctcccacatttctttagatcatggcttatgtttgataatattgtgagatacatctaatctcctgttaacatttgtataaagtgcatttcctatctctgcatgacattgttctaccctctttgaagacatcagctttgtgataggtggcatttgatattgtgactaacctaacatctactgtacgaagggtaataatacaatactaacagttattatacacttataatgtgccaggcaccttctaagcttattttgttttataattcagtgtataatatatgttaattttcataacatcaaggaatagataatttctttatttccattctatgaacaaggaaactgaaattaaacaactccgccagtagcatgccactagcaggtccaacatccaaatccagagatgatccagcattatgatgcaaaatataccaatggcgctattctcacttaacagagaccatttggaaagaagtaataaaaggatatgaactgaacacagttacagaatcacagactcctaaggccaaaacgaacttcaatatcctctagtttttcttgcccaaaatatcaatccaagaaattaactggttacttattaaaagtagacagccaggaaaaaggagaactgaatatttcaaaacaaatagtccaaatggacaaacaagctctgaacagagccacttttagaaggaggagagagaacgttaaggcatttatgaataaaaggcagacttctttagaaggagtcgccatattggctcactacaactccgcctcccgggttcaagtgattctcctgctgggattacaggcgccccccaccacgcccggctagtttttgtatttttagtagagacggggtttcaccatgttggtcaggctggtctcaaactcctgacctcgtgatccgcccgcctcagcctcccaaagtgctaggattacaggcgtgagcacgcgcctggccacaaaatgcagacttctaaagtagaagtccagcttggccagataatagactcactagcatataaactgctggaagctaatgtaggaggtcaggaaggaatgataaggttagaggaaccaaagcccagagagggtttttgtttggttctttggcagcacttaactctaggaagtgatggggaaattctaatttctgagaatgtttttcaaaaggatgacagagattagagcttccagtgaagaaaatattgctgcaatcaaagaaagcaaagtgcaataaagccctcaggccagacggaatttatctaagtattctggagaaaataaggtgtgaaacagcagagactgatgaggacatatactatgaccattaaaataacagctgttcctgaagactgtccaatttttaacacagtatctatggttttttttgtttttgttttgttttgttttgtttaaaggaaaccaagagaaatcccaagaattcagacaaatgaactttgtcttggtgctcggatactggttgggggaaaaagtccgatgattgtgccaagtagaatctgagaattgaaacttgacaggcccccatcaactctgcaggaatagagatttttacctctccaagcttaaaattgataataagtaatacagagatacaccatgcacttgcccttttaaaaagtttgaaaatgaagaaacaaatgctttcttggatctgaaactagctagagaaattagaatcatgtatagtgtatgcttaggccaaagagaagagattagctatagcactcctggaatctgatgttggaatgaaatgtaatttcacctgcattttttaaataattagggagtatgtgtgagtcacaagcaattgactctcacatgattgacactctgtgggagcaagcagtgaaaaagaaatggtgagcacctgatcctatgataatcatcactagcatttattgaatggttactacgtggcaggcacactgcttagtgtttgacatccattatctcaattattctcagtctgtgagtgatggtataaactacttcagaaacatctgctgtttcagaaagaaaatgctctaaggtgtagggcagattatcagccagggtcacagttcagatgagttccaaagaaagcttatctaaaatattctgatgaaaatgtggcttccatttaaaaccgaatgggggccaagagaattgtaaaggaaactcgaggatgcaatctattctctgcccctcaatccctgagccagccagggatacttattttctcctaaacctaaaaatagtcacgctaacattggtttcagactctcagaatcaccagctctgagactacagagatcttctcactctttcctatctcctggtccttaaacccgcttccttaccttgcttctgtgccttgctaattataactgctttttgtttgtttgtttcctgattcctgtggctcaatctgtgttcctagggccttcatctgtggtacccacctgggattttagactcatgtggggggtctaaagctttggcttaagtttagtctgaaactctcctaggctttggtccacaacctcctgccacccaacatggtgctgacagggaggacaatctgtagcccatgaagattagagctatgctattaatcaatgatctttcccaactaaaatacttagttcagggctcttcgcacaatgctcaaagtactttctgttcaataaaggcttgttgactgtatttacaacacatgctgtactatgaactgcataccaaagtccaaattacaacatataacctctatgacaagaacgagtaaaaaaataaaaccacagccttggagggatgccagatgatgctggacccatgaaaaactccagagaggaaacaaaaggtactgaacagaaatggagtgcacacaccgtaaccttgttctctcatcttttgtgaactatgacgggtcacctttgcaaaattataagccttttgagagtagggtacaatacagcttcaacggcagggtgcctacagtccccatcactcctcctgccaccagggaacttgcaggaagggagctttcctgttagctttcctccctggtaaagcactgaccacagccttgaatgccacaaagccacattgggaaaaatatgaagttttgtcctacccacattatatctggacagatagttatttagaaaagaatcattctgcattttatgtattataacattggctatacaggatctctctctctcatcacccaagtctggttccttcctagtctacatctgcctcttgctcctcaaagagcttacttttcctctcggtttctttaagcaatagctctccttactatgtggtgtgatggttaattttatgtgtcagattggctagcctgtagtaactagttattcaaatatgaatctaggtatggccatagagatattttgtaggtgagtttaatatctataatcatggactaaccttttaaaaaatctataatcagttgactttaggtaaaggacattatcctcaacaatgtagatgagcctcattcaatcagttgaaaggtttaagggcaaaaataagtttccctgaggaagaaattctgcttcaagattgcaatatcagctcctgcctaagaattttcagcctgctggcctgccccgatcctatagattttggacttaccagcctccacaattgcatactgaaagaagtctctctccatacataggcatgccttgcttaacagaggcacattctgagaaatgcatcctaaggcaatttcatcattttgtgaacatcatacagtatacttacacaaacataaatggtatagcctgctacacccctgggctatatggtatagcttattgctttcaggctacagaccggtacagcatgttactgtatggaatactgtaggcaattgtaacatgatggtaagaatctgtgtatctaagcctagaaaagctacagtaaaaatgtggtattaaaagacaaaaaaaaattgtactcctgtaaagggcatttaccatgaatggagcttacagaatgagaagttactttgggtgattcagtgagtgagtagtgactgaatgtgaaggccgaggatgttactgtatactactgtagactttatcaacactgtacaccaagctacactatatttatttttttaattcttcaacaataaattaatcttcacttactgtaacctttttatttataagctttgtttttaactttttggctattttgtaggaacacttagcttaaaacataaactcattgtgcaattgtacaaaaattctttctttatatccttattctacgagccattttctatttttaatttttttttaaatttttgaacttttttgttaaaaaccaagacaaaaacatacacattagcctaggtctacacaggatcaggattatcaagatgtcactagacgataggaattttttagctccatttttacttatgcaactactgtcatataagcgggccatcactgaccaaaaacatgtttatacagcacattaaagtctattcatttactatcttgggggtaaattagtgttgctgctggaaccctgacaattttcaagtgagggaacgtggagaaatacaaatatatttttatatgttttacacataaaatatataataattatacttttattattatattatatatatttatcctaaaatagataaatgttatatacatttatgtttttatacataaaataaatatatgttatatacatttatgtttttataaataaaataaatatatgttatatacatttgtttctataaaataaatatgttatatacatttatgtttttataaattaaatatatgttatatacattgtgtttttataaataaaataaatatatgttacatactttttttataaataaaataaatatgttatatacatttatgtttttataaataaaataaatatatgctatatacatttgtttttataaataaaataaatgttatatacatttatgtttttataaataaaataaatatgtgttatatatttatgtttttataaaataaatatgtgttatatatttgtttttataaataaaataaatatgtgttatatattcatgtttttataaataaaataaatatgtgttatatattcatgtttttataaataaaataaatatgtgttatacatgtttttataaataaaataaatgtgttatatatttgtttttataaataaaataaatatgtgttatatatttatgtttttataaaataaatatgtgttatatatttatgtttttataagtaaaattaatatgtgttatatatttatgtttttataaataaaataaatacgtgttatatatttatgtttttataaataaaataaatacgtgttatatatttatgtttttataaataaatacgtgttatatatttatgtttttataaataaaataaatacgtgttatatatttatgtttttataaataaaataaatatgtgttatatatttatgtttttataaataaaataaatatatgttatatatatttatatatatatttcaattttctcacttgtaaattgtcagggttccagcaacaaaaataatttaccctccagatttcaaatgaatagactttaatgaaggaacaatggatagaagagttggcaggattaaggaaacaaaaaagggcaggttaggcaccagagactagcaacagagggaaggcattacccctctagagctgaaagggtaagaggaagaaagaatttgctgaaagctggaccttgggtggagcctcctcacaggacctgtggtcagagagggacacagctatctccagacaggcggcactgaagcagtgagggggcaagaaagactctgatctccctctcctcctactctccaatttcttgtccagtgagtcaggattcaattggtagaacccaaacagagttggctaggaatagagcatggcaaggcagagaagaggagagaatgggtcttccagggagcggggtgtggggaggggagccacttcgggaagctgagatgggaggatcgcttaagctaagaagttggagaccagcctgggcaacatggcaaaaccccatttctacaaaaatattttatgaaattagctgggcatggtggcacgcacctgtagtcccagctacttgggaggctaaggtggaaggatcgcttgagcctgtgggaggtcgaggtgcagtgagctgtgactgcgtcactgcactccagcctgagtgacagagagagaccctgtctcagaaaaaaaaaaaaaaaaaaaaaaaaaaaaatatatatatatatatagagagcatagcgtggttctcctaagactcaagctacatattcatactggttttcaactttcataaaagattccgtgtgatttcacttcttatctactaatacaccatatccaattaataccaaattatgtcttatctaatattattattttccctggccccaagtctttcttacgtattatttagttacactggcaatcacccagaatttagttgcgcttcctttattctgtatcacttttatcaatcatgtaccccaaactcaattttaatcaattaataatgacacatacatccatttacatacaaaatatagacaacgatttttataaaagaatctatatatgttcaataggtttggggctaaatattattctcttttatacctatcagattgcattcattgtaattctatgtacataaaatacgttcaatagcttctttttcttgtaaattttcatctttttaagacacaaaacagtagacttatctatcactgtcctatatattatggtcaaagagagaaaagggcatattattctgcttagaaaggagttaaccatagcagtcatatatggagttatctgtccaggaccctcatctgggaagtgcctgtgttcctcactccatttgtgcggttatcacagaaggtgtcctatggccacagttaattggctcaacagtagacattagacctaagatgacctcatcacagtcccttccccagacttcatttcctagctaaagcatataagtccaggctgggcacctgattcaaacggaaaaaactggaattcacctttgggaatattgcatctagaagtgagaagtatacattgggtctctgaactgtgatgtatgaaactaaaaggtcaactatcagtaactgaatttccagtcatgtagaacagaaaaggggaaaaagtaagagaaagaaaaaaaagtgagtgtgtgtgtgtatgtatgtgtgtgtgtgtgtgtgtgcaagtaacagaagtgggagccatgtagattcttaatggtgctggagtctgtgtttctaatggtacctcaagtccagctacatttctacctttgagtcttctaaatcttccaccttgctcaaattagtttgaattggattctgttatatataagccagtgggttcttatgaataaaattcctaccatctaaacttatcaaatgcaaggttaagcctcaaaaaggtcggtgcacttgtcagaaacatgtagaaagtaacttatgaaagaaaaatgaacttatgaaaagaaaaaaatcacacattaatttcttgtcaatgaatctgactggctaattttccatttctaggatgttgtcttcagtggcaggaaggtttaaacccatcgttcccattagagtttacactaggagcaataatgaaccttaaatgattcttaaacatggaatctaagtggagtcaagaacagaattatattgaatcttcattttaaaagctacgtgagccatatttattcttttaaaatggagcaaatatgttctgaaacccaaaaagaggtgagttacttaagcaagcccaacattaggccggtagtatcatttcagatgctcatagccatcatagggacatagaagatattccaaagtgatttctatcaatcctagtttccatttctcacctgaactttctactctctctttgtagactttgactttgggttgtggaggcagactgctgggtttccaatctccagtctgccacttactatctgtgggaccttgagtgaattacttagcatctctgtgcctcagtttcttggtctgtaaaataatatgaaaacagggcccccacaagtggtagctgagaatagtaaatgagttaatagatgtaaaggaattggaagaaaacctggcagataatgagcactcgacaatgttagctcttattatttagaggccatgaatcccttaattttgcagcttcaaataaagcactcacacagacacaaacttgctggtgatttaaataaggaaacataaatcaaaggtaaattttaattaaatcagttaatggcacatggatcagttgggaaatgagtttacttcagaaattatttctaagagtgttcctcataaaacaatatgaccacattagatatatagttaagggaaacattaaaaatatataatgtgtaacctttcaattttcacttaacagctgcctttatattattattattcaaagtgatttttagataaggggacttatgaatgattttctcaaaaaaaatcgataccagtttgatcagtcttgaggatactgggtcatagcaactaccagtactcagacattggggaattgttcagggaaaaggcagcaactttgaagtatcctcaagaataagaagggcatgttgaaacaattaatcataaacaagtcattcaaattaaaagtgtattcttaaatagtttcttgattaagaacaaatgcctcattaatctggaacatattgacttgagaacacaagtaaagtcaaagagagtaatgactgacatgacgtggaacacagcatgctgtgtgttcccatcacaaaagctttggaggaacagattccacagaaggtcactggagacagtgaactgaagagaaaacccagcatcacccaatgacgcaaaggtaaatttttaaaaatctagattacagagaacattgggtaccagtagcactgacactatttccatctatagattctgagttcatttcatttatttcaggcatgcaaataagtctaaacccaagatctaaaaaataaaaaataaagatatatctaaaagaaataggcatctaattttaaagaaacttactgtcctcccccgactcccacttcccaagtgttagttaagaatgtgactagaagttaaaaaccaacgaaaatagctttgaagaaaattctagtataattattagatgatactagattggatattctttggatcacactaaagctacatttcttaaaggagtatatatagtacctagtaaatataataataaatgtgagatgtgcataaaaatcacacacataatttttaaaaaccgatcagacattaaatgcccataggaggatgactctgcagtttttaaagattaaatctggttttggaatagtcgtcaaaatatgtgtcatattctgaaaggctttataatttcatcttctagaaggtaagcttcatgaggaaaggaactttttcccatcttgaccactactatatcctcagaacagtgcttaggacataatagatactccatatgtatttaatgaataagtaatttcaacagtggctgaaattctaacctggatatatctgttgtgattctagttttaacaattggcctcaggactttttcttgcagttggccccttatccatgccccctcacaccttccctgtactcagcccctgtactcagcatgacttccacacagatgtctgcttataatgaagagaaagaaaatctccatgaaagattataaatggttgggatgaatattatgtgcaaagaatttcccaaattccattatctaaagtatggcacaaaaaattaccatcatctttccaatactagaataaattcttctgaagacaaaatttaacataatttatagagtcagattctagatatgactatattatttttacttaaataacatactcatttcaaacttcaagacaaggaaaagagaatttttttctagaaagaagaaagcagcgtaatgagaaagaagggaaagtagagttctaccactctaagtagctataatcagactttgttttcagcaatgtttaaacctcatcactcccaaagttttaatcttgacagcaggatagcaaaggaaaatattggaacacaaccaggactagaacatttcttatttcttagatctacacccagcttgtgctggaatacaaattaccatagcctctgctcatgaaaacaaataatccagttagaggtacaaggctagcaaacaagacacataactatatactgccttatattcactcatgtactaaattgtgtggaacaattcctaaatgttacacagcctagagatgagaggtaattctagcatctagcacagtgtccagcacatattagacatgcaataaatacttgataagtaaatgaaagcttgaatgagagaatgaataaataagtgcttttagaagaggtgaatcttgtttagaatcctggagaatgatgctaagcactcgatttgtatcttccacaaatgacatttcaatgtttcctacctctctgtcttctcccacatgatagaaactgtatcaaccttgtgcagaaaacaaaagagaagcaagaaaatccaattgttttcttttttttttttttttctttttgagacggagtctcgctctgtagcccagcctggagtgcagtggcgcgatctcagctcactgcaagctccgagaaaacccaactgttttcttaataatattggtagtcttggagacttgacccgaaaaaattattcaatagggctgattgtccataggtctgtagtttataattaaatctgtttacaatgggaatactacatcataatgcaaccagtaacaagcccatcagagttaaacacttgctagaattatcattataaatccctggtttcgattattcacaattaggttgtagaagttttattttttctttaaatataatcataaagttctcatttgggatatatatatatcctagaaattttctaactataatgtgtgctgctcttaggaattttcaaagaaaacaatgagaacaattttcaagaaaaatgactaaaacaaattttaaaaattcttaaaatcaatccaaagaaactttgcaaatctcggccaggcgcggtggctcactcctgtaaccccagcactgtgggaggccgaggcgggcggatcacgaggtcaggagattgagacgatcctggctaacacgatgaaaccccgtctctactaaaaatacaaaaaataagctagccatagtggttggtgcctgtagtcccagctactcgggaggctgaggcaggagaatggcgtgaaccccggaggcggagcttgcagtgagccgagatcgcgccactgcactccagcctgggtgacagagcgagaatccgtctaaaaaaaaaaaaaagaaagaaactttgcaaatctcaatctctatatcaaggttttccccctagaactcatgtctctacagttcttttgaattatttcagaatctgtaaaaccccatgaaataaactcatataagagcaattcactgtgtctaggaaactgtatccagtaagggtccttggcataccagggaatatattgggcttggaattaagaaacttgggtttacttctactcctaattaactggttaaacttcaacaggaccctttcacttttctgggccccttccttatttattgaattagggtgttggaatggataatccataggttttcctagccttaattaaggatgggagccagttgtcaatacagcatagttaggtattagaagcaattataattagaactaaaatgcctctgctcatatctgagttctcttctaggtcttgtcccaggcacatactttatttctctacataatgttttcctcatctataaaaagggagtgataacaatacatatcccatgagagttcatcatgattaaatgaaatatagcacatgaagcactcatcgtagaatatggcacctatcagtactcaatgttagttggcagtattatgtatctataacttttttcagttttcagaaaggactgggagaatgaagtcttatcattggatgtcaagaaatccttcagccagttattaaatttgtttacagctggcaggcctgcaacaccaataatcaaagtatccttgtataggattattcaatagggctgattgtccataggtctatagtttataattaagtctacttacaatgggaataccacatcataatgcaaccagtaacaagcccatcagagttaaatacttgctagaattctcattataaatccctggtgcaaactcttttttgcctttaattcttttgaagggatcccaggtttcaaagtctgtatccctttatggttataaatccccaacattttagttccaaaacccataatgggctaaaaattaaaacctgtttgggctgagtgcggtggcttatgcctgtaatctcagcactttgggaggccgaagtgggcagatcacctgaggtcaggagttcgagaccagcctggccaacatggtgaaaccccatctccactaaaaatacaaaaaaaaaaaaaaattatctaggcatgttgatgcacacctgtaatcctaactactcgggaggctgaggcacaagatttgcttgaacctgggaggtggaggttgcagtgagccgaaatcatgccactgcactccaccctgggcgacagagtgagactctgtctcaaaaaccaaaacaaaaagaaacctgtctgaagcgttggcagaaaatttaaattgttcttcatacttttgaaagtaggggagaaaaagaattaggtctcagcaacatctatatcttgaaaatagccttaacatgtaacatcagaagcaagcaaaagaagaatttgatctacaaaacctggttttggtaatccattcaagtcagcattttaatggggctatgtacattttccgaaatgcttgcccacttctggccatgcttcactaatacccaagtcaccaagcagacagcactatctaaccaacaactggggccctctggtaaccagtgtccctgtaccagtaacacatgctgccaaagttctagggcttcaatcatgataataaaaattaataaaaaattgagcatcccagagcaacacagatagttttatgagggagacacagggctaatttaataagatggaacttattaaattccaggatgtaaaaaccctggatcctatatttcaaattgtttctcagtattgagtgttatccagcatgcatcaagcatttaaagggtgagatgtgattaccttctttctcaaaatgcagaaaagcctttgttaaggaaatcatttctacaaccttcttggtaatagtaagaaatttaaggtgtctgtgcttgtagccacttctgtctaaagaagcatgttgtgtgaaaggtgatccatcccatttcctggccacagctgactggatgtggggaaaacaatgacccaccaaatggctcatccacagataagacagcaatctgtgactcctgtggcctagccaatcagattctccctcttaggaatcagttctaagagattcaaagggctatgtccaatgaactgttttcctttcatgaaaggaaagtttgaggctgaagccatgaaaaaatcaggataggtgcagccatctgggctctgtgaataatgaatgaatcagcagaagcagtcagttaggatagagagagtactagaaaaaaagcagattaagaggaaacatccaagaccagacacagtggctcacacctgtaatcccaaacctttgggaggccaaagcaggcagaccatttgagcccaggagttggagaccagcctgggcaacatggcaaaacccaatctccactaaaaataccaaaaaattagctgggcatggtagccagtgcctgtagtcccagctactcaggaggctaaagtagaaggatcacctgagcctgggaagttgaggctgcagtgagctgtgatcccacaactgtattccagcctgagcaaaagatcaagagcatgtcttaaaacaaaacaaaacaaagcaaaaattagaaaaacatagcccttgaaagagacatcttgagagatgagtcagttttgagagaagggctgattcagttctgtaggtttggtgttcagtttgatctggattcctgtgagacctcgttctctcacttaaattaaactccttgagctggccttcttccttatgacttaaaaagcccaattcaaacacttctctttcagtaatacattctttttttccactggaatttgttagtattgtctttccaaagctttggataacataaacattggcttaaaagtcattttttaaaatcatttcagccatttggtgaccctaagagagtacacatacttttatagggtttcacagaaattccaagacaaaggattaatgtattgtttctgtgagtttctattcaattcaaattttataattcaaaaattttaagttgttatcaaccacagtaagaattataagaatgctatctataattttaaagagaatgttttgcactaacaactgaaacatttattgaaaagaaatttttatcggtcttatagggcttttgtgtgaatttagcaaagttagcatgtatataaggcacaagtaccatcggaaaagttctaaaaagaattagttatgtagttatttcatatccacagtgcaagggcaaggttgaacagaacttttctccatatagttgctcaaactgcccagtgattttctttctttcttttttttatagtgctttgttgaaatggtttaagggctccactgactgaaagttaacccccagtatgcattggctgctgagtgttttttgttttactcaccggcccttgagtaccgtgtttaatttccacaccacagtaatgtgaatgatctaggtaatctcacataatggtttgctataggacacccaaaccttcatcccaggaatacttggaacaagatgaaacaagatgagtcacttgtggtgaagccacactaaccatgctgccagggtcttactgtactttgcttctggaaggcctcattaagcaaaggtgccaagttacatgcttgatgaggagattgattcttgagtccttccttacaaccagagtatctgggtaagaaccaaagacctctgagtggaacctatcaaaagtcatgcataagagagccacagggtaagaagaagtgaaatttgaaggggacttccggtgacctcatcacctataagaaagaaaagtctagtagttctgttcttggaatacttgttctgttaagatttagcaaaacagtttgaccaatagatttttaaggtttcttgctggttcttaagccataagactgcaaacaaactctcctaaggtcagacatgttgaggtatttatgctacagtcaaaagggttgcttatgccttgcttaatatacgcatagagagatcgcaaattacatctataattttccatacaacaaatcaaatttggcccataaataaagaagtcaacttatgaaagttacaaaagaaatttgtaaagttttagaactactaaaattattggatccagaaaaccgaatgtaattccacactgagaatactcgatgtatcacgtgtttctggcttcaaatcatgtgtcactgaaaacaaagaaaggaggtttttaaaattatgttcccggttgtaaatatttgcagattgacatgatttctctttctagttatttttttccatgtaatggatgaaacactatctttttccttctttattcatgaaactccaatgtcatcaagcctcagtttgtgactggaatgaaggcacattaatatatgcccacaaagttacagacttctttctgctccctgcttctagaaaaccttaggattggaagagtttctcccaccacccaagaaattctggcacgttccagagaatgactttgctggtgaagagacagctggttgtgctggtatgaatacgtctggttttttgccatggttcatgggacataaggggtctaagtccactgatcatgaagaatattaccggccgggtggggtggctcacacttgtaatcccagcactttcagaggccgaggtggggcggatcacgagttcaggagatcgaggccatcctggccaacgtggtgaaacccagtctctactaaaaattaaaaagttagctgggcgtggtggtgcatacctgtaatcccagctactcaggaggccgaggctggagaatcacttgagcttgggaggcggagcttgcagtgagccgagatcgtgccactgcacgccagcctggggacagagcaagacgctgtttcaaaaaaaaaaaataataataatattaccttatccaggacagctcctggtgtccccagtgctacacagcaatgtggcaccatcatggcactgtctttccttcaatcttccttgctgtgcacatgctggattccatccagaaatcagaaaaaatatgtctagctcctgaattcacaggactcagaactattcattcaccccttccaggaagtcaataccatattatcctctgcatttcctacattctcatctctcagagccctatcgggccttcagatataaaatgttccctttctcctctcttcttccttctccaaatgtaaatcaggcatgcaaatatatgcctgggagaattgccgaatccataaagctgttctcagtttaggctaagcagagatcacagtctatatctacatttgctctgttggaacatgagattacaatagttaataaagatgagatacagagtaacctttacaccttaggcttttgtatttttcagtaagaagaatgtcacagttcttcctagcttgccaaagaaattgaataaaaatgtactgaactaggagtaaaactttgtgctggctaggtaaaatgacatgtgatattgttcacaggaaataatggaaaacagaaagattttccatcttgtcaagcagatggaatgggcttggatagaaagaagagaggaaaatgatagaataaacaccagttgtgaactctgctaagagaactggtaggttttatatattaaagagatgggctaaagtggtttataagaaaatgtaatgtattttactagtgtaattttacgtcatctggtattatacatggcatatagagtgcaagaaatttgcaagtgggaaaactgaggttttcaatagaaatattgagttggctcatgagcctggatgcactacaaaatagtgagatgactcgggagcaactcaggccgaggagtgacccacttgaagactggcaaagtgggagctgagacagaagacaggaaagtggatgcttgaatgaaggtcacaacagccataaagaaaagaaaaggcagaatatctattgaaaaatgacgactccattgacagaaagagaaaattaatttagaagacaatttgtgtgctctgtaaatcttcagttgtcacagcaaagaggaaagttttctctgttcttttttttcttattttttttgtgggtacatagtaggtgtatatatttatggggtacgtgagatattttgatataggcatacaatgcataataatcacatcagggtaaatagagtatccatcacctaagcatttatcctttctttgtgttacagacaatccaattatactcttttcgttattttcaaatgtacaatgaattattggtgactacagacactttgttgtgcgatcaaacactagatcttattcattctatataactatatttttgtacccattaaccatccccgtttccttccctcacccccaccctgacctctctaccctaccacccttcccagcctctgatagccatcattatactctgtttccatgatttcaattgttttcatttttatctcccacaaataagtgagaacatgcacattttatctttgtgtgcctggcttatttcactatacataatgtctcccagttctatctatggcattgcaaatggcaggatctcatattttatggctgaatattactccactgtgtatatgcactacattttctttgtccatttgtctgttgatggacacttagaatatttccaaatcttggctattgtgaatagtgctgcaaaaacataggagtgcagatagctctttgatacactcatttcctttcttcaggtatgtatagagcagagggattgctggatcctatggtagctctattattagtttttctgaggaaactccaaaccattctccacagtggttgttccaatttacattccaaccaaaggagtacaagagatcccttttctagccattctcatcagcattcattattgcctgtcttctggataaaagtcatcacaactggagtgagatggtatctcattgtagttttgacttttatttctctgatgatcaatgatgttaattaagcatcttttcatattcctgtttgtcatttgtgtttcttctttagaaaatgtctattcagatcctttgcatattttaaaatcagattattacatttaatcctattgagttgtttgaactctttgtatgttctggtcattaagcccttgtcagatgggtagtttgcaaatattttcttcccttctgtgggttatctcttcactttgttggttgtttcttttattgtgcagaagcttttcaacttgatgtgatcccatttgtccatttttgcttttgttgcctgtggttgtggggtattactcaagaaatctttgcccataccaatgtaccagatagtttaccaaatgttttcttttagtagttttagagtttgagaccttagaattaagcctttgatccattttgatttgatttttccatagtgataggtagggatctagcttcattcttctgcatatgaatattttgttttcccaatgccatttattgaagaggctgtcctttccccaatgtatgcttttggcatctttgtcaaaaatgaattcactgtagatatatggatttatttctgggttttatcttctgttccattggtctatatgtctatttttatgccagtaccttgctggtttggttactacagttctgcagtataatttgaagtcaggtaatgtgagtcttttatttttgttctttttgcttaggatagctttggctattctgggtcttttgtggttccatataaattttagaattattttttctatttctgtaaaaaaatatcattggtatcttgatagagattacattgaatctatagagtgctctgggtagtatggacattttaatagtattgtttcttctattccatgaacatagacaatctttccattttagtgtgtcctcttcaatgttttgcatcaatgttttatagtttacattgtggagatgtttcacttctttgcttaagtttattcctaggtttttgttgttgttttgttttgttttgtttttgagatgcagtcacgctctgtcgcccaggctggagtgcagtggtgccatctcggctcactgcaagctccgcctctggggttcaggccattctcctgcctcagcctcctgagtagctgggactacaggtgcccgccaccacatctggctacttttttgtatttttagtacagatggggtttcaccatgttagccaggatggtctccatctcctgacctcgtgatctgcctgcctgggcctcccaaagtgctgggattataggcgtcagccaccgcacccggccattcctagttttctttttatcttatttgtagctattgttaaagggattactttcttgatttctttttcagattattcactgctgtcaaatagaaatactactgattttttatgtcggttttgtatcctgcaactttactaaatttgcttatcaattctaatagtttttatggagtctttaggtttttcccaaaataagatcatgttatctgcaaataaggataactttacttcttccttttcaatccagatgccctttatttcatttgtcaaatttctctagctagtgcttccaatacaatgctgaataacagtggtgaaagtgggcatccttgttttgttccagatcttagaggaaagccttttggttgttcctcattcgggagaagactagcttgggtcagttgtatatggcttttattgtgttgaggtatgttcctcctatatccagctttttgagaatttatatcatgaagagatattgaatttgatcagatgacttttcagtaacaattaaaatgatcagatggtttttgttctttattctgctgatatgatgtatcacataggttgatttgtgtatcaacatccttgtatccctgggataaatcccacctggtcatgataaatgatttttattaatatgttgttgaattcaatttgctagtattttgttgaggatttttgcgtcaatgttcatcagggatattggcctatacattttttttgttgttgatgtatctttgtcttgtattgattttagcataacactgtccttgtagatttagtttggaagtattccctcctcctctactttttgaaatagcttgaatcagattggtattagttttcctttaaatgattgctaaaattcagcagtgaagccattgggtcttgggcatttctttgctgggagactttttattacagctttgatcttattacttgttgctgatctgttcagattttggatttcctcatgattcaatcttggtaggctttatgtgtctaggaatttatccatttcttctagactttccaatttattggcatatagttgctcatagtagcctctaatgatccttttaatttctgcagtattagttttaatgtctcctttttcatctttgattttatttatttgactcttttctctttttacttagtctagctaatggtttgttgattttgtttatcttttcaaaaagcaacttttaatttcattgaacttttgtattttttgtttcaattttatttatatctgagctttattatttcttttttctagcaattttgggtttgttttttctcttatttttctagttattaaagatgtattattaggctgtttgaagtttttctacttctttgatgtagacacttataaccatatatttccttctcagtactgcttctggtatgctttttgatatgttgtgtttccattgtgatttatttcaaaaaagtttttaatttccttctttatttcttcattgacccattggtcattcaggagcatatttttgaattcccatgtgtttgtatagtttccaaaactcctcttgttattgatatctagttttattctattatggtcagagaaggtgcttgacattatttccatttttaaaaaaatcttttaagacttgttttgtggcctaacacacagtccattcttaagaatgatccatgtgctaagaaaccaaatgtgtattctgcagctggaaaaaaaattgttccgtaagtgtctgttaatattaggtccatttggtctaactgcagactaagtccaatgtttcttactttattttctgtccacatgctcatctaatgctgaaagtgggctgttgaagtctccagctattattgtattggggtctatctctctttttagctctaataatatttgctttaaatatctaattgctccagtgttgggtgcatatatatttacaattattatatcttcttgctgaattgacctctttatcattacttaatgagcttttttgtctctcttcatagatttttttcttgaaatctattttattttatataagtgtagctagtcctgctcttgttttgttttcattggcatagaatatctttttccaaccctttattttcagtctatatgtatctttgtagttaaagtatcttttttgtaggcaacagattattgggtcttgctttttaatccagttagtcactctatgtcttttgaatggagagtttagtacatttgcattcaatgttactcttgataagtaaggatttactcttgctgttttgttgttttctgattgttttgtggtcttttattcctttattccttccttcctatctttctttagtgaaggtgcatttctctggtggtatgttttaatgtcttgctttttattttttgtgtgtttgttgtaggtttttttatttgacattatcatgaggcttgcaaggaatatcttataacctgttattttaaactgatgataacttaccactgattatataaacaaactaacaagcaaaaaaaaaaaaaaccttaataaaaagtctacattttaactttatccctcctttttaactttttgttgtttctatttagttcttatcataatgtctatgtcttgaaaagttgtacatcttatttttgacaggttcatcttttggtctttctactcaacgtatgtgtagtttgcactccacaattacagtgtgatgatattgatgatattttgtcttactgtgtccttgtccttcttttttttttttttttttttttttgagatagggtctcactcttccaggctggagtggagtggctcaattttggctcactacaacctccgcctcccaggcacaagcaatcctcccacctcagcatcccaagtagcgtgaaccaccacacctggctaatttttgtgtttttttttagagatgggttttgtatttttagtaagatggattttgtgttttatgtagagatattttttgtagaaatgggtttcctcatgtctcccaggcttgtctcaaactcctgagctcaagtgatcctcctttcttggcctcccacaatgctgagattacaccatgcctggcctgtacttactattaacagtgagttttgtaccttcagatgatttcttactgctcattaacatcctttttatttgagattgaagaactccttttagcattccttttaagacaggtccagtgttgaaatccctcagcttttgttggtctaggaaagtatttctccttcatgtttgaaggatattttcactggatgtactattctaggataaaagttttttcttcatcactgtgaatatgtcatgccactgtctcctagcctgtgaagtttccaatgagaaacttctctgccaggcatattgaagctcctttttatgttatttttttcccttgctgtttttaagatccattctttatcctagacctttaggagtttgattattaaatgttttgaggtagtcttattttgattaaggtgttctatagccttcttgtacttgattattagtatctttttctagatttcagaggttctctgttcttatacctttgaataaactttctatccctatctctctttctatcttctctttaaggccaataactcttaaatttgcccttttgaggcaatcttctagatcttgtaggcatacttcattcttttttattcttttttcttttgtctcttctgactatgtattttaaataacctatcttcaagctcactaatactttctttggcttgattaattctgctgttaaaagtctgatgtactcttcagtatgtcgtactcttcagtatgtcgattgcattttcagttctagaatttctgcttgattctttttaattattttaattaatttgtttaatttatctgataggattccaaattccttctctgtgtcatcctgaattttgttgtgcttcctcaaaacagctattttgttgtttttgtctattttctttttttgagacaggggctcactcagtcctccaggctgaagtgcaatggtgtgatcatggctcaatgcagcctctacctcccaggctcaagcaatcctcctgcctgatcctccgaagtaattgagatcacagacatatgatatcaccatacccagctaattaataaaattttttttgtagagatggggtcccactatgttgcccagactggtttgaaactcctgggctcaagtagtcctcgtctcaccctcgcaaagtgctggaattacagacatgagccactgcacccaaacaaacagctattttggatcatctgtctgagagttcacatacttcggtctctctggactgggcactggtgtctcatttagtttggttaggtcatgtttttctgggtggtcttgatgcttgtggatgttcattggtatctgggcattgaatatttaggtatttattgaagtctttacagtctgtgcttgtttttacccatccttcttggaaagctttccgataattcaaagggacctgaatgttatgatctaagtctttggtcactgtagccatgtctccatttagaggacatcccaaggccagtagcactgtggctcttgcagtctcatagatgtaccactttggtgctcttgggtaagatctggaggaattccttgaattaccagggagagactcttgttctcttccttactttaccccaaacaaatggagtctctctctcttcccttactttcccccagacaaactgggtctctctctctttctctgtgctgacctgcctagagctggaggaggggtgacacaagcacccctgtggccaccaccactgatacagaactgggtcagacttgaagccaacacagcactcggtctcactcaaggcccacagtgaccactgcctggctaccgcctatgttcactcaaggcccaaggactctacaatcagcaggtggcaaattcagccaggtttgtgtccttcccttcagggcaaggagttccctggggccctgggcaggtcctgaaatgctgtctgggagccagggcctggagtcaggaatcttaggaatctacctggtactgtattctactgcagctgagctggcacccaagccacaagacaaagctcttaccactcttctcccctttcctcatgcagaggagtgtctcccagtggccaccactgccccaggctggtggtaagtaattcctggttacctcctatgttgactcaaggcccaaggactctgaagtcagcttgtggtaaatgctgccaggcctgggtctttctcttcagggcagttgactcccctctggcccaggacttgtccagaaatgccatccagaatccaaggcctggaatcaaggaccccaggtgcctgcttggtgctctatcccactgtggctgagctggtaaccaagctgcaagacatagtcccctttactcattcctctccttttcttaaacagaaaaaaagtctccttgtggccaatacagctgtaaatgtgctaggtcacacctgaagccagcatagctgtgagccgaacccaaggcctgcagtgagtactgcctggcttccactgttgattattcagggcccaagtgctctttagtcagctggtgataaatcctgcccattctgagtccttcctgtcaaggcaatgggttcccttctggcaaaaggtgtgtctacaaatgtcaacagggatagggcctggaacgaggggcctcaggactctgcctggtcccctgttctactgtggttcagctagtacccaagttgcaagacatagtgctattttctctcccctctcctctcttcaagtggagtctctcctggagctgtgagctgcattaccagggtctgggggaggggtggctcaagcactccctcggcctccccagctggtgtctcactagattgtatgcatcccaagtccactgctctgaacccagcacaacatcaggacttgcccaggaattgcagtccttgtggcctaggctacctttcaagtttatttaggaccccatagcacacaaagtggtggggtttgcaggaactcaggttctgaccactggaatggatgatttgcctctggctagggctggtctaaatgctccgtttcgtgggtactggctgatttctgcccccttttgctttctgctataacagggtagcactgagttccagtgcaaagtcccacaatcaatgcattctccctccccaacgtgcacagattctctctccaagccacatggctgctaccaggcaatgtggtaggagcggcattggcaattcaagactgccttttcaagacacaacaaaaaaagaaaatttcaggccaatatccctgatgaacattaatgtgaaaattctcaataaaatactggcaaactgaatccagcggcacatcaaaaagcttatccattacgatcaagtcggcttcataccgacttgcctccaaagcttgcctccagctttgttctttttgcttaggattgtcttggctatatgggctcttttttggttctatatgaaatttaaagtagtttttttttctaattttttgaagaaagtcaatggtagcttgatggggatagcattgaatctataaatgtcacatccgttgcacggacatgaatgaagctgtaaaccatcattctcagcaaactaacacaagaacagaaaaccaaacaccgcatattctcactcatacatgggagatgaacaatgagaacacatgtacacagggaggggaataccacacactggggcctgtcgggggttggggtgctaggggagggatagcattaggagaaatacccaatgtagatgaccggttgatgggtgcagcaaaccaccatggcacgtgtatacctatgtaacaaacctgcacgttctgcacatgtaccccagaacttaaagtaaaataataataataattttaaaaaatactgccttttctacccttttcagggcctcttccttagtaggatgtgaaaaccaggtactataattgctcacctgatttttggttcttatgagggtggttttctgtgtggatagttgttcaacttggagctcctgcagggggaacaaacagtggaagcttctatttggccatcttgctccacctcccactgaaaagtatttttatgctaagcaatttgaaaatatttagatgaataatttttaaatagaggaaaatctctactctgaaatccaaagtcttctgagtccattctgttttttgtcatgctaaaaatatgaggcttacatattttttacacaggccaaattctgctcagttaaatacagcagattgtttagattggtatcttaaacacaaactagataatctggttccgttgcttccatggcatctgaattggtgtcatcctctttttcagaacaaatatctaaggatgtttccaaggcatcacaatattatattggcctagttagaacagaagtgtcatctctaaatctcacacgtgtgtgtgaatgcaagcacccttactggtagagaaccaggaagtccttggtctgtaaataccccaagaaagaaaaccactgctagcaatattataatgcataaactaagcatgatatttttaaatataattcacacatccaagtgtgtgttgctgcctttacagtatccatttgggaagttgtgcatttattctaatgagattggcattgttcaaaacatgatctggagtttcttttcaacaatgatcttaattgtctgtggcacatatttttgactgtccatatggtaaagtatctttatcttttgtgtgtaaacttgatttcaaaataaccaaaagtaagtcagaagtaaattttaagaacaagaaagacaattaaattgggaaatcccataaacaggtaaggtgggtactgaagaagatttatctggatgtatttaccttttgtgagttattaattttgctatacctcatacagtcaagtcttctttgagacagttttgttgtctttaccttcagaagttatattaggttggtgcaaaagtaattgtggtttttgccattaaaggtaatgttattaataatatcctgaattttactcttgacaaaaagcataggttttatattatctgtgtatatgagaatgcatgaatgtgtgtattttcataacaaaatggaagcaaaaattctatagaattcaatcttttatatttagcaaaaacaaatattccatatattgtttaattcagcattgaataattaagcaaaatacttgcaattaacttgcacataaacttcttaaaagatatcacatcaaaatatgagatttctttaagctatgtcttcaatattttatgcaaagatctgttctgaaagatgctttggcaagaattttaataatctataaatttttttctttaatctttataataatctttatataataaccatattatttttgttaaatatttttctccttttcaaaatattgttttataagttctcatgctctttaattacaattaatatttataaattttttctatgattatctgtatgagaaatctttgatagcaaacacagtaaaataatgttttgccttaagttttagaaactgaagttgttataaaaccattctattaggatttaaattatatcacgccagccagacttatttatgcaaatgttttctccctaccactgtgctcattgagaaggactgctgacccaggtgttttgtagcttttaaaataattgttcaatatgatattaggttgtagaatgtggtcacaaatttctcaagtctagagaagtccattccagaagtctagcaggtctattccactgactctcaactttattatgcttatgcttgactcttatgtctttcctatttaacttattttataaaatgtagaacatatgttttgaaagtcaaaccataccaaagtcaaacctggtgggagtgctacaactgtaaaaaggtggaaacactcagtaagcagtcaaagtttggcatggaaatagacacggctgcaataaggtagtggacttatgggctaagtttccttgctttcatacttgcatgtagtgtagctagtttcccaaaacacataaaaggaagtcatttctctgtgaagtggtctttagaggagggtttttctacttcagcattattatttgagactggataattctttgctgtgtgtgtggatgggggtgggagggttgctgtgctgtgcgttatgagatgtttagcagcattgcatccgtggtctttgtccattagatgctgttgacatccttcttcccaattgtggccaccaaaagtgtttctagacatacccaaatgtccactgggggaacaaaaccctcgttcctcaccattttccctcctctgtggttgagaatgacttctctagattaccatttcaagatttagcttaagtttctgacagtggtgttacagaaggccattttcatcattgtcatttattatttcatgttagtttagtggtttactacaagtagcctagggtcaaggaaatatatccagttcatttaatagtattcttaatcaactatgttcctaagttcttatgtttcttttaatctatgaacctatgttcctactgttgcctgaaagattcacaagaggaaaaatgtactgagtatagacaataaaaaatttaatgtggccaaatatagcatatatttaacattgtaaagcatatctcaaatatttgcagcatttcatggcaacaaaagctgctatagaataagtgggtcagaattaccatcagggaagtagtacccaaaatatcttccgactattataggccaggccaaagcaaaaaacagctcaattagatttgggaggcattccttccaggctgctaaagtatcaccagtcaaacagcattcacaagaaacacaggtctgagataaccaagttagtgctctaataagacttcaaatgctctgagaacaagcttcactgtatttttgctcacagaagtttcacatctatccttgctcaggcctaggattttagtcggctagcagcaaaagaagatgaacttgaaatttcacttcaagaagtattaggctttatggaatataaaagtaattcagaagcatagaaaaccatgaataataaacaaactctgatagaaaataaataaaggaactcaaggaattgccttccaatatccttggcaaccagagaagcaatcaatgagttttaaaactcccatatacatatttggtgctcacaaatacctgaataataaagacgattatcatgcagagtgacaaagtacagataaacacactccagctttgcaagtacaaaaccagttaaaaccagttattctactcctgacgtttaacaagtagagctttacacatatactaaaagccacagtgaactgggtgaaagtttgttgggcctggggagtgggaaactggcttagtaacaccagagtcatctcagtgtgtgacccctggcaaaccatgctcctgagaagacagcagaaggaaaaggttgctttaccaaaggttagaaatacaggaatatagagtgcgtgaatgcaagctatgtgacttatgtaggcttttacataccaaagctgcttccaaagtcagtaggagaggctggtcccatcagctggataagcacagcaaaaattaagatggtttgatatccacatctccagttgcttaagttgtttactctgttccctctgaatcacatcacatcttattttcaactgaaacatggaaacctttctggcctaatacttcttttccaaataatatttattttcatgtggcattaatctttttttactaattattcttgggtgcagcatattttgtaaccacctaagcacacactgatccaaagctgaatattataaatagttataatcacattcatcaaaaagttcaaagtgagagtgggctaaaaaataagtaggagtcagaaagagagagtaggagattgggtaaaatgataaaataatgagaaaaagaaataatttctatgtatcaggtaggagagagaagctatttcctagggctttgggggaaatgaatttcccacaccaaaggtggagtagattgaaaaaccgatagattgctcttcactccttcactgaggttctgaaactgtaggcattgaatgctgcattaaagatacatgtgcatcttattcctcataagtaaattacattgttttattactatgctgtgtggcccaaaaggcaagcaataatttttagtggctgagaagaaactagtttcacaaacaaggggcactttgaaaaaacaaatgtactcaaaaagacaatgttgctctgggctttatttagaattaaattccagaactcactcaaaactgcagaaccagtactcaaatttggtaccccttttgctcatccttcctaaagtcacccttcacacacaaatctttccaccctcctctccaggcattttaaatagctgcaggattagaaattgcaaaacagatgcctccggccaaaagcaccaagttttgctgataaattttcctgaaatcacacaaatggaaaaaacggaagtcagaagtgtacattttatattcagcagctaaagtctgaaatctcaggttataagtaaattattttgtgattaaatcctaatctcatcaatttaaagaaccaaaaacccagctcaataatccaccacaatcttaccttgaaaatgtggttctcttatttgaatgtcttcttccagtactaattcgatttcttttcctgaaaattctgccacatggtgctactttcggacatttaatatatttcatttataattactctcacgtgtaaatggtatctttaaataatatgtgcaggagttcttaataagttttcacaactctccttataaagcaaagctattcatttttagagagtttgaacgttttggtgttaatttgataaataacagctattggacaactgaagagaataaccactcacaggcaatcttctctttgtacttgattttaaaatattaatatttcattcatggtgtcttctcaaattaaatttctcagggttactggacctcagatactaaaaggacaaagaaaagggacagatgagaacagctacgaagcgatagtgaaaacatatggtgtccatcttgtaagcataaggctccctggtattgctgccactctccctgtgctcgggaaagctggaagaagccagtaggcaatctggtgtctcgtcagaagagtgccagaaacaggtgttgctgacctaaccctttcctcctaccacagattctcttggtaaatcctacactcgttaccatagcattgctttcaaacacacttatcagatgaaaaccaagtgttccaaaataacagtttatatggagtcaaaatgctgaaaattgctgtgattggttttttctttctctttttttttttcagtttttagaatcgggtaattttaaaattacaataaaatgcacacattttaagtgttccctgcgtgagtgttgatggttgtatacaccgatgtagcaccacccaaaacaagatacaaaacgtttcaatcactccagaagttttcctccttctccttttcagtcaaaccacactgtactgatttccattgccatagacaattttgcctgtctttgaacataatatactgtatatattctttacatctggcttttttttgccaatatatatttttaagactcattcttactgttgcatgttatcactagctcattccttttcattacagagtaatatttaactgtataaatataccacaatttgcttactcattttctaggaaatggatatttaagtgtttccagatgttcttggaacagtctcatataagactttgtgtagacgtatgtgatcatatcacctggataaatacctaggagtggaattcctgagacacaatatgtttaacttttaagaatgtggcaaacctttccccacaatcgttgtaatattttactctactgacttgttagtatttatctttctccatatcctcatcaatatttggtgctgtcagtcttagccattccagtgagtgtgaaatgctaactcattatgattctaaattgcatctctctgacgacttatgatgttgaatagcttttcaggtgttcattagcctcatcctatgtaggacatcttattcccaaattttcttttgctaagtgtctttccagactttggcccattttttactgagctgtttatctttttattgttgactcgtaaaagttatttatatattctggatatgacctattcatgaaaaataagtgatgagaattttcaaagtctgtcgattgcctgttcactttcttttaatgagcagaaattaaattttattgaaaatcaaatattctttgacaggtgaaatgtttttaattctaatacatttttgcataccccagggttacaaagatattatttattttcttcaaaaagctttttgattataatgtttatatttaagtttatgatctatttctacgtaatttttgtgttttgggtgaggtaagatcagagatcattttttgttttctaatggatagccaatctttcttgcatcatttgttttttttttgtttgattgtttattttggtttttttgagacggaagctcactctgtcgcccaggctggagtgcagtggcgagatctctgctcactgcaaaatccctgcctcccaggttccagcgattctcctgcctcagcctccgaggtagctgggactacaggagtccgccacagtgtccggctaacttttgtatttttagtagagatggggtttcaccatgttggccaggctggccttgaattcctgacctcaggtgatctgcctgcctcaggctcccaaagtgctgggattataggcatgagccaccgtgcccggccacatcatttgttttaagaaaatattttctttattaatctaatttgccactctggtcagatatcaatgtatgtttgtatgtatgtatcatatacgtgtgtatatatcacatatatctgtatgtgccaatttctggattttgtattctgcttcatcaatctattatttcgccaacatcatattcacttgattacagtgacattgtattaagtcctgaaatcaaatagtgtaaatccatcaactttgttcttctttatcaatattattttggttagtctagattctttgcactttctaactcacttcaaaagagcctgtttctaggtattttgggtttttgatgctattgtggacaatattttaaatagcattttatagttgtttattgttagtaattagaaatgcaattgatatttgaatattagccctgtgtccagagactgctaaattcacttattagttctagtagttatttgtttgtgtgtggattacatgaagttttctttttttttctttttttgagacggagtctggctctgttgcccaggctggagtgcagtggtgcgatctcagctcactgcaagctccgcctcccgggttcatgccattctcctgcctcagcctcccgagtagctgggactacaggtgcctgccaccacacccggctaattttttttgtatttttagtagagacggggtttcaccgtgttaaccaggatggtctcgatctcctgacctcatgatctgcgcacctcggcctcccaaagtgctgggattacaggcgtgagccaccatgcagggcccacatggagttttctacacacaagcacgtcatttgtgaataatgatagtttcacttctttttaattttagtgtgtcatttctttttctggcctcactgcactaactagaagtcacagtacaatgttgaatacaagcaatgacagctattcaaatatttatccttatccatatatttccctttctggtgctttattccctttcctgtagatcctggcttccacatggtataactccttcttagtccaaagagcttcttttagtatttgctgtagtataaatctgccacagacaaatttaatcatttttcttttagaaataattttatcttcatatttgtaggatgtctttataggaaatagaattgtgggctgacaatattttcttttagcattttaaagatattgttctattattttctagccttcactgtttctgatactgagacagccattattcttgtcattgttcccttacatatagttatcgcttttatttgtctattataagatactgctttttattttgggtttacagtaatttgaccacgatgtacataggtgaagatattttttatatactccacttagggttgattacacttctttgctgtctttcacttattttgaaaattctcttctattatctcttcaaatatttcttctacctcattctttctctcctctcacaggactccaacaacacatatggtagatcatttgatttgggcccacaggtcttggaaatgctcttccattattttcattgttttaaaacatctctctctgtgtttcattttggatattttccactgatcagtctttaagtttaccagtttctttctcactcagttcagttgtcaataagcccattgaacaaattcttcttttcccatgttatgtatttcatttctagcatttccaactaacttttaaaacatgtgcatttcattgataaagttgccaatctacttacatacattatctaccctttccacaagctgatcataattattttaaaattcctgtctgctaattccaacacctggaacatctctgcatttgtttctattgactatgtgctctctttaacatggattatattttcttctttcattacttgtcaaactttttatttatattattttatattatttataaaatataaaatattttatattatttataaatataaaatattttatttattttatattatttataaatataaaatattttatttattttatattatttattttatgtatttatttattttatattatttattttatttatgtattttatattatttatttattgtatagtgcataaaggaatagtaatgaccaaagaaaaacagtattttcccacagaaaagttatgtcctttcttctgtctggttgtaagtttgttgaaccgaatcaatctaacctagagtaaagctgtgtttggacattttcacaggtttagttacattcagtttactactggctttacattatgtgagaatgagatcaggaatttctcttcagtagtgtgttggaatcctagcaccagtggtactctggagatttatttgttcttttcatccagcctccagttttctgaaccatggggcatctctttattttttatttatagtctcgctactagatttttggtcactggggagttttctttgccttcatgccagattttctgaattttaaccttggacctattaatgaccgattgtctaacttgaatgaactcactgaactttttcatctcattactaaaatagaataagaatcactacttccatgtgtgttaaggagtgacctaacatcaaacagctaacatgcatataggagaagcatatgtgttctagttgaactgcacgtgaaagtcaaatttgttaagaaaataaaatactctttccagctcaatctgtctctatcattaacattttgaattcagtactgttgaaccaaatgccaagtcagcaactaattatatttttcttctataggtctatctttttaaaaataagacagtattaaatcagcctgagttattagaaaggatagtgggagcacatgatcaaattaaaaattacatagattcctgaaataattttattatttgcaattttctagtgacctccagaacttcatgacatgtgatattttaatgcagaaacatactgaaagacagacagcatgtaaattcacaacctctgtgttatagactgcatgaaaggtagatgagaaaagaaagaaaaagaagagagaataccagggagttaatattcagcatcactttatcagccatgcaatggattaacattcattaatccagtattgtagctgaacagagtagcacagagagtttctgtactctctctgtaactgtggtttaaaaaaagaagtttgcattgttgaaattaacccatatccactgccaaaagtacatgatccagtggctaacatgtaatgatgctatttctaaaaaatgtgttgtaattaaatgtcacagtcttgcatatatttcagacaactcagcactgaagtcaagtcaggtcactgatagaaagttattggtcaatgatcccattaagcatgtgaagtgatgctctatattcaaaacgacttcatcttctctaaggataaaaccaccacctgatcccaaagggtgtatccttgtcctcatgagaactccattaaaaattaatatctccaccaattacagtaagctggaaggagattctacttttattgtggtgaaactttttataatgagaacattgctaggaaaaaatatctcaactaagaagagtataaggtcaaaaaaagaattgaaagcactttccctttaccttattgtctcacaataagacctaagaaaatatgtgtggtccaagattgcttgtgatatataccttactctgaccatatttgtaaattcttgtactgaaggctaaataaattcatgaattgaaatgttcctcctgagcttggaacaaatatatttcacgtttgtaagttcttctcataaggatgatttttgaaatttcatagactaaacatacatttatatcttccctctcactccaaatcacacagagtaaaatattttatgcctattaaaagtacaagcaatgaaccacaaattttgtgaatttcagagagacagacagcatatacaatcatgcctttagcaaaataaaactgaatgaaactataggctagaatacacctagaagaagcctgttgttgaagggggaggtttgaaagtccccaagtccagtattagaagttttaaaaattaagacagaaccctcaaacatttaaagagtaattagttggaaggctccttttggaatagcagacgagttgatttctttctttcctgtcttttgcactatgtgggctttaacaactggctagagaagaatattgaagttggagaagacttacagtgctaggtagctactcacttccaggagtgatgagaacttccacatttgaaagataagcttccattccaaatgtttcccccatttgttggggatagattctggtaatgcaaagaacaagtaagcggtgactctcaaatacaaagctataggcagccaagatgtgctaaacattttacaaaagtcagtaatagagaaactaggcattaacaaaaagaagaatgaccacccccttcttagaaagagttaataaagttaacaaaaagacttagaataaatatgaatagttgaaagacttgaaagaacatttcctttatgtagaagtatctgctacaaaatttaattttaaaaattctatcttctcagaattaaaaaaataagaaaatttcaataggtaggcaataatagcagcaatacatactttatggtgaattagtgagttgaaagattgagctgaaacattttcacatggaatagaacagatggacaaaagaaaggaaattataagtgcagagttaaatgacatgaagagtattatcttgatattcccaaatctagattataggaattccagactgaaagaaatgagaaaatgcaaggatgtatataatcaaataaatatcaacccaaaaaaatcctcaggtctggagaaagcataaatcttcaaattaaaagtgctaagccagattttataagagccaaagctacatgcatcattgtgaaatttcagaatttcaaggataaactcagagaaaaacaacttgaaaaaaaaatcaaactctgaaaagtcagcctgccatcagcataactcctcataaagacaactcagtactagaagtcattaacatcttccaaattaaagggggtgatgattttcaacctacaatcccatacctagccaaactagcatttgagtgaaagagattctaaatacatattcagacaagaaaagcctccagctaagcaatctctgaaagaattacttgaggatacacagcaaaaaataagtaacgaatccagaaaaggacatcacgtggtcctaaatatacaaaagtgtaataagcaaattcatactaaaacctaaataattgttgatgtgcaacactaaaccaaaacataataaacacttggaacaaaaattccacataaactcagtatgaaatatggtagaattaatgaagaggaaaaaatcaaaggtgagagaagatttttactttttgggaaatggaagcagataatcattaatcttaaatatcaatagaacaatacaaatttttaaaaatgtgttaaaaatgtaagagtaagtattagaagtgtaagatctatatcttctaaatcatagtattaaaaaatggatcttagaaaaacatccaaatttgaaaggatcatgcttccaggctttctcttgtgcctttgtggtggttgccaaatacatttattttctgccaagaatgcactacctctgctaaagtgttttctagctatttgtctattagtatattattttgcaatatatgctatatcttgccacaatgccaagaattctccgacaatctacaattctctgaagttaaagaagattattagatctatccattacaggctgtcacatgtcttcaacttcttcaagctaagttcaatcgctggctccactgcagtgcacaaaaagctctaaaaagctccaattcaagccataattggaggtttgggctccagcacagttgtccagattttccaaatgtccagcttgtgcattctggtataaattccagaatgaaaaacattccactggatgaggaatgtatcataatgtgcagaaactagtttctagtccatttagacacaaaaacaagctcggaagaggaaaatcacaagcagtttcattagcatcaaatcataaaacacagccatttacaaaactagcttctctctcttccattggtccaaagaagtatcctgggacaagagtggtcttgaaaaaaaaacctaacccttcgggatacccagagatattattcatttaagtacattgtatctggagttttttttttaaactcattgacataattcaaattaatttttaaaagttctcggctacttcacacatacgctattgaagctatcgtcacaccattattgatattttaatacatttaactgttagctaactgaatattcacagatattattaatacatacaacatgggtggcaaaacttgtttttccagtctctttataacttgcctcatttgtcatcaaatccatgtggagtgaaaaataaaagctccccaatcgatttaatttaataaagctaagaaataggtggtgtcttcccgggactgtgttgatgaaattgacccaacactcagttctagcatttcctctccgagaagagcttaactttacttaataagacagagagggggaggagccaagatggccgaataggaacagctccggtctacagctcccagagtgagcgacgcagaagacgggtgatttctgcatttccatctgaggtaccgggttcatctcactagggagtgccagacagtgggcgcaggccagtgggtgtgcgcaccgtgcgcgagccgaagcagggcgaggcattgcctcacctgggaagcgcaaggggtcagggagttccctttccgagtcaaagaaaggggtgatggacgcacctggaaaatcgggtcactcccacccgaatactgcgcttttcagaccggcttaaaaaacggggcaccatgagactatatcccacacctggctcggagggtcctacgcccacggaatctcgctgattgctagcacagcagtctgagatcaaactgcaaggcagcagctaggctgggggaggggagcccgccattgcccaggcttgcttaggtaaacaaagcagccgggaagctcgaactgggtggagcccaccacagctcaaggaggcctgcctgcctctgtaggctccacctctgggggcagggcacagacaaacaaaaagacagcagtaacctctgcagacttaaatgtccctgtctgacagctttgaagagagcagtggttctcccagcacgcagctggagatctgagaatgggcagactacctcctcaagtgggtccctgacccctgacccccgagcagcctaactgggaggcaccccccagcaggggcacactgacacctcacacggcagggtattccaacagacctgcagctgagggtcctgtctgttagaaggaaaactaacaaacagaaaggacatccacaccaaaaacccatctgtacatcaccatcatcaaagaccaaaagtagataaaaccacaaagatggggaaaaaacagaacagaaaaactggaaactctaaaatgcagagcgcctctcctcctccaaaggaacgcagttcctcaccagcaacggatcaaagctggatggagaatgactttgacgagctgagagaagaaggtttcagacgatcaaattactctgagctacgggaggacattcaaaccaaaggcaaagaagttgaaaactttgaaaaaaatttagaagaatgtataactagaataaccaatacagagaagtgcttaaaggagctgatggagctgaaaaccaaggctcgagaactacgtgaagaatgcagaagcctcaggagccgatgcgatcaactggaagaaagggtatcagcaatggaagatgaaatgaatgaaatgaagcaagaagggaaggttagagaaaaaagaatacaaagaaatgagcaaagcctctaagaaatatgggactatgtgaaaagaccaaatctacgtctgattggtgtacctgaaaatgatgcagagaatggaaccaagttggaaaacactctacaggatattatccaggagaacttccccaatctagcaaggcaggccaacgttcagattcaggaaatacagagaacgccacaaagatactcctcgagaagagcaactccaagacacataattgtcagattcaccaaagttgaaatgaaggaaaaaatgttaagggcagccagagagaaaggtcggtttaccctcaaagggaagcccatcagactaacagcggatctctcggcagaaaccctacaagccagaagagagtgggggccaatattcaacattcttaaagaaaagaattttcaacccagaatttcatttccagccaaactaagcttcataagtgaaggagaaataaaatactttacagacaagcaaatgctgagagattttgtcaccaccaggcctgccctaaaagagctcctgaaggaagcgctaaacatggaaaggaacaaccggtaccagccactgcaaaatcatgccaaaatgtaaagaccattgagactaggaagaaactgcatcaactaacgagcaaaatcaccagctaacatcataatgacaggatcaaattcacacataacaatattaactttaaatgtaaatggactaaattctccaattaaaagacacagactggcaagttggataaagagtcaagacccatcagtgtgctgtattcaggaaacccatctcacgtgcagagacacacataggctgaaaataaaaggatggaggaagatctaccaagcaaatggaaaacaaaaaaaggcaggggttgcaatcctagtctctgataaaacagactttaaaccaacaaagatcaaaagagacaaagaaggccattacataatggtaaagggatcaattcaacaagaagagctaactatcctaaatatatatgcacccaatacaggagcacccagattcataaagcaagttctgagtgacctacaaagagacttagactcccacacattaataatgggagactttaacacctcactgttaacattagacagatcaatgagacagaaagtcaacaaggatacccaggaattgaactcatctctgcaccaagcggacctaatagacatctacagaactctccaccccaaatcaatagaatatacatttttttcagcaccacaccacacctattccaaaattgaccacatagttggaagtaaagctctcctcagcaaatgtaaaagaacagaaattataacaaactatctctcagaccacagtgcaatcaaactagaactcaggattaagaatctcactcaaagccgctcaactacatggaaactgaacaacctgctcctgaatgactactgggtacataacgaaatgaaggcagaaataaagatgttctttgaaaccaacgagaacaaagacacaacataccagaatctctgggacgcattcaaagcagtgtgtagagggaaatttatagcactaaatgcccacaagagaaagcaggaaagatccaaaattgacaccctaacatcacaattaaaagaactagaaaagcaagagcaaacacattcaaaagctagcagaaggcaagaaataactaaaatcagagcagaactgaaggaaatagagacacaaaaaacccttcaaaaaatcaatgaatccaggagctggttttttgaaaggatcaacaaaattgatagaccgctagcaagactaataaagaaaaaaagagaggagaatcaaatagacacaataaaaaatgataaaggggatatcaccaccgatcccacagaaatacaaactaccatcagagaatactataaacacctctacgcaaataaaccagaaaatctagaagaaatggataaattcctcgacacatacactctcccaagactaaagcaggaagaagttgaatctctgaatagaccaataacaggagctgaaattgtggcaataatcaatagtttaccaaccaaaaagagtccaggaccagatggattcacagccgaattctaccagaggtacaaggaggaactggtaccattccttctgaaactattccaatcaatagaaaaagagggaatcctccctaactcattttatgaggccagcatcattctgataccaaagccgggcagagacacaaccaaaaaagagaattttagaccaatatccttgatgaacattgatgcaaaaatcctcaataaaatactggcaaaccgaatccagcagcacatcaaaaagcttatccaccatgatcaagtgggcttcatccctgggatgcaaggctggttcaatatacgcaaatcaataaatgtaatccagcatagaaacagaaccaaagacaaaaaccacatgattatctcaatagatgcagaataggcctttgacaaaattcaacaacccttcatgctaaaaactctcagtaaattaggtattgatgggacgtatttcaaaataataagagctatctatgacaaacccacagccaatatcatactgaatgggcaaaaactggaagcattcctttgaaaactggcacaagacagggatgccctctctcaccactcctattcaacacagtgttggaagttctggccagggcaatcaggcaggagaaggaaataaagggtattcaattaggaaaagaggaagtcaaattgtccctttttgcagacgacatgattgtttatctagaaaaccccatcgtctcagcccaaaatctccttaagctgataagcaacttcagcaaagtctcaggatacaaaatcaatgtacaaaaatcacaagcattcttatacaccaacaacagacaaacagagagccaaatcatgagtgaactcccattcacaattgcttcaaagagaataaaatacctaggaatccaatttacaagggatgtgaaggacctcttcaaggagaactacaaaccactgctcaaggaaataaaagaggatacaaacaaatggaagaacattccatgctcatgggtaggaagaatcaatatcgtgaaaatggccatactgcccaaggtaatttacagattcaatgccatccccatcaagctaccaatgactttcttcacagaattggaaaaaactactttaaatttcatatggaaccaaaaaagagcccgcatcgccaagtcaatcctaagccaaaagaacaaagctggaggcatcacactacctgacttcaaactatactacaaggctacagtaactaaaacagcatggtactggtaccaaaacagagatatagatcaatggaacagaacagagccctcagaaataacgccgcatacctacaattatctgatctttgacaaacctgagaaaaacaagcaacggggaaaggattccctatttaataaatggtgctgggaaaactggctagccatatgtagaaagctgaaactggatcccttccttacaccttatacaaaaatcaattcaagatggattaaagatttaaacgttagacctaaaaccataaaaatcctagaagaaaacctaggcattaccattcaggacataggcgtgggcaaggacttcatgtccaaaacaccaaaagcaatggcaacaaaagccaaaattgacaaatgggatctaattaaactaaagagcttctgcacagcaaaagaaactaccatcagagtgaacaggcaacctacaacatgggagaaaattttcgcaacctactcatctgacaaagggctaatatccagaatctacaatgaactcaaacaaatttacaagaaaaaaacaaacaaccccatcaaaaagtgggcgaaggacatgaacagacacttctcaaaagaagacatttatgcagccaaaaaatacatgaaaaaatgctcatcatcactggccatcagagaaatgcaaatcaaaaccacaatgagataccatctcacaccagttagaatggcaatcattaaaaagtcaggaaacaacaggtgctggagaggatgtggagaaataggaacacttttacactgttggtgggactgtaaactagttcaaccattgtggaagtcagtgtggcaattcctcagggatctagaactagaaataccatttgacccagccatcccattactgggtatatacccaaatgactataaatcatgctgctataaagacacatgcacacgtatgtttattgcggcattattcacaatagcaaacacttggaaccaacccaaatgtccaacaacgatagactggattaagaaaatgtggcacatatacaccatggaatactatgcagccataaaaaaggatgagttcatgtcctttgtagggacatggatgaaattggaaaccatcattctcagtaaactatcgcaagaacaaaaaaccaaacaccgcatattctcactcataggtgggaattgaacaatgagatcacatggtcacaggaaggggaatatcacactctggggactgtggtggggtggggggaggggggaggggtagcattgggagatatacctaatgctagatgacgagttagtgggtgcagcgcaccagcatggcacatgtatacatatgtaactaacctgcacaatgtgcacatgtaccctaaaacttaaagtataataataaaaaaaaaaaagacagagaaacacaacttgcatgaacaagcaaatactcagtttgattcaacagtaagagaaacctcctgtaatagaaggttctttatatgtggaatccaggccttgagaaaaaggaggtaaggttggaaactgagttgctgatacttctagcaagacccttttaatgtgcccgaatatttactctactaacaatagcaaacgagagaacaagagcgtataggtagtagtgctgcctaatataatggggtgacatgaggacttgggtgtgtgctttctgtcagagaagcccagggaataggagtttcagcattatatctcagacaacagcaaactttgagatcccttgctgtacagagaaggaaagcagaaactctatagtaaggcctaataatttgtggtgtaagccaatagtacataataaatgtatcctttatcagagctctatgatggaaagatgagaatgtttgagaaaaaataaatgaatacatttgggaatttatattttcttttgtctcagacactggatctatcatgtgcacagggacacacgcatgcatactcacacacatacaaacacaagaatgcctcattaatatctacctgcatgcaaatctatattgtacaaatcctggtgattacttaaaaatagcaattactcagatttcactatgtgccagataccattctaagtgatttaggtatattaactcaatctttacaacaaccttatcatgatcctcaattattttttatttattttattttatttttattatactttaagttctagggtacctgtgcacaacatgcagatttgttacatatgtatacatgtgccatgttggtgtgctgcacccattcactcgtcatttacattaggtatatctcctaatgctatccctccccacttcccccaccccacgacaggccccggtgtgtgatgttcgccttcctgtatccaagtgttctcattgttcagttcccacctatgagtgagaacatgtggtgtttggttttttgcccttgcgatagtttgctcagaatgatggtttccagcttcatccatgttcctacaaaggacatgaactcatccttttttatggctgcatagtattccatggtgtatatgtgccatattttcttaatccagtctatcattgatggacatttgggctggttccaagtctttgctattgtgaatagtgctgcaataaacatacatgtacatgtgtctttatactagcatgatttataatcctttgggtatatacccagtaatgggatggctgggtcaaatggtatttccagttctagatccttgaggaatcaccacactgtcttccacaatggttgaactagtttacagtcccaccaacagtgtaaaagtgttcctatttctccacatcctctccagcacctgttgtttcctgactttttaatgatcacccttctaactggtgtgagatggtatcttgttgaggttttgatttgcatttctctgatggccagtgatggtgagcattttttcatgtgtctgttggctgcataaacgtcttcttttgagaagtgtttattcatatccttcgcccactttttgatggggttgctttttcctcgtaaatttgtttgagttctttgtagattctagatactagccctttgtcagatgagtagattgcaaaaattttctcccattctgtaggttgcctgttcactctgattgtagtttcttttgctgtgcagaagctctttagtttaattagatcccatttgtcaattttggcttttgttgccattgcttttggtgttttagacatgaagtccttgcccatgcctatgtcctgagtggtattgcctaggttttcttctagggtttttatggttttaggtctaatatttaagtgtttaatccatcttgaattaatttttgtataaggtgtaaggaagtgatccagtttcagctgtctacatatggctagccagttttcccagcaccatttattaaatagggaatcctttccccatttcttcgttttgtcagatttgtcaaagatcagatggttatagatgtgtcgtattatttctgaggactctgttcttttccgtggtctttacatgctgttttggttactgtggccttgtagtatagtttgaagtcaggtagtgtgatgcctccagctttgttcttttggcttaggattgacttggcaatgtgggctcttttttggttccatatgaactttaaagtggtttttttccaattctgtgaagaaagtcattggtagcttgatggggatggcattgaatctataaattaccttgggcagtatggccattttcacgatattgattcttcctacccatgagcatggaatgttcttccatttctttgtgtcctcttttattttcttgagcaatggtttgtagttctccttgaagaagtccttcacatcccttgtaagttggattcctaagtattttactctctttgaagcaattgtgaataggagttcactcatgatttggctgtttgtctgctattggtgtataggaatgcttgtgattttttcacactgattttctatctgagattttgctgaagttgcttatcagcttaaggagattttgggctgagacgatggggctttctaattatacaataatgtcatctggaaacagggacaatttgacttcctcttttcctaattgaataccctttacttctttctgttccctgattgccctggccagaactttcaacactatgttgaataggagtggtgagagagggcatccctgtcttgtgccagttttcaaagggaatgcttccagtttttgcccattcagtatgatattggctgtagtttgtcataaatagctattattattttgagacatgtcccatcagtacctaatttattgagagtttttagcatgaagggttgttgaattttgtcaaaggccttttctgcatctattgagataatcatgtggtttttgtctttggttctgtttatatgctggattacattaatgatttgcgtatgttgaaccagccttgcatcccagggatgaagcccactagatcatggcagataagctttttgatgtgctgctggattcggtttgccagtattttattgaggacttttgcatcaatgttcatcagggatattggtctaaaattctctttttttgttgtgtctcttccaggctttggtatcacgatgatgctagcctcataaaatgagttagggagggttccctctttctctattgattggaatagtttcagaaggaatggtaccagttcctccttgtacctctggtagaattcggctatgaatccatccggtcctggactttttttggttggtaggctattaattattgcctcaatttcagagcctgttattggtctattcggggattcaacttcttcctggtttagtatttggagggtgtatgtgtccaggaacttatccatttcttctagattttctagtttatttgcgtagaggtgtttatagtattctctgatggtagtttgtatttctgtgggatcagtggtgatatcccctttatcattttttattgtgtctatttgattcttctctcttttcttctttattagtcttgctagcagtctaacaattttgttgatcttttcaaaaaaccagctcctgggttcattgattttttgaagggttttttgtgtctctatttccttcagttctgctctgatcttacttatttcttgccttctgctagcttttgaatgtgtttgctcttgcttctctagttcttttaattgtgatgttagggtgtcaattttagatctttcctgctttctcttgtgggcatttagtgctataaatttccctctacacactgctttaaatgtgtcccagagattctggtatgttgtgtctttgttctcattggtttccaaggacatatttatttctgccttcattccgttatgtacccagtattcattcaggagcagtttgttcagtttccatgtagttgattggttttgagtgagtttctcaatcctgagttctagtttgattgcactgtggtctgagagacagtttgttataattcctcttcttttacattcgctgaagagtgttttacttccaactatatggtcagttttggaataagtgtgatgtggtgctgacaagaatgtatattctgttgatttggggtggagagttccgtagatgtctattaggtccgcgttgtgcagagctgatttcaattcctggacatccttgttaactttctgtctcattgatctgtataatgttgacagtggggtgttaaagtctccaattattattgtgtgggagtctaagtctctttgtaggtctctaaggacttgctttatgaatctgggtgctcctgtattgggtgcatacatatttaggatagttagctcttcttgttgaattgatccctttaccattatgtaatggccttctttgtctcctttgatctttgttggtttatagtctgttttatcagagactaggattgcaacccctgccttttttgttttccatttgcttggtagatcttcctccatccctttattttgagcctatgtgtgtctctgcacgtgagatgggtctcctgaatacagcacactgatgggtcttgactctttatccaatttgccagtctgtgtcttttaattggagcatttagcccatttacatttaaggttaatattgttacatgtgaatttgatcatgtcattatgatgttagctggttattttgctcgttagttgatgcagtttcttcctagcatcgatggtctttacaatttggcatgtttttgcagtggatggtaccggttgttcctttccatgtttagtgcttccttcaggagctcttgtagggcaggcctggtggtgacaaaatctgtcagcatttgcttgtctgtaaaggattttatttctccttcacttatgaagcttagtttggctggatatgaaattctgggttgaaaattcttttctttaagaatgttgaatattggcccccactctcttctggcttatagagtttctgccgagatccacggttcgtctgatgggcttccctttgtgggtaacccgacctttctctctggctgccttaaaattttttccttcatttcaactttggtgaatctgacaattatgtgttttggagttgctcttctcgaggagtatctttgtggtgttctctgtatttcctgaatttgaatgttggcctgccttgctaggttggggatgttctcctggataatgtcctgcagagtgttttccaacttggttccattctccccgtcactttcaggtacaccaatcagacatagatttggtcttttcacatagtcccatatttcttggaggctttattcgtttctttttactctgttttctctaaacttctcttctcacttcatttcattcatttgatcttccatcactgataccctttcttccagttgatcaaatcggctactgaagcttgtgcatgtttcatgtagttctcgtgccatggttttcagctccatcaggtcctttaaggacttctctacactggttattccagttagtcattcatctaatcttttttcaaggttttaagcttctttgcgatgggttcgaacttcctcctttagctcggagaagtttaatcatctgaagccttcttctctcaactcgtcagtcattccccatccagctttgttctgctgctggcaaggaggtgtgttcgtttggagggggagaggtgctctgattcttggaattttcagcttttctgctctgttttttccccatctttgtggttttatctacctttgctctttgatgatgatgacatacagatgaagttttggtgtggatgtcctttctgtttgtcagttttccttctaacagtcaggaccctcagctgcaggtctgttggagtttgcttggaggtccactccagaccctgtttgcctgggtatcagtagcagaggctgcagaacagcgaatatttttgaacagcaaatgttgctgtctgatcgttcctctggaagttttgtctcaaaggggtacccggtcatgtgaggtgtcagtctgcccctactggggggtgcctcccagttagactactcgggggtcagagacccatttgaggaggcagtctgtctgttctcagatctcagactccatgctgggagaaccactactctcttcaaagctgtcagacagggatatttaagtctgcagaagtttctgctgccttttgtttggttatgccctgcccccaaaggtggagtctacagaggcaggcaggcctccttgagctgcgatgggctccacccagttcgaacttcccagacactttgtttatctactcaagcctcagcaatggcgggcaccactcccccagcctcgctgctgccttgcagtttgatctcagactactatgcaagcaatgaagcagtctccgtgggcgtgggacactccgaaccacgtgcgggatataatctcctggtgtgccgtttgctaagaccgttggaaaagcacagtattagggtgggagtgacccgattttccaggtgccatctgtcacagcttcccttggctaggaaagagaattccctgaccccttgcgctgctcggtgggctgcacccactgtcctgcctccagtgtctgacaagccccagtgagatgaacccggtacctcagttggaaatgcagaaatcacacatcttctgtgcgctcacactgggagctgtagactggatctgttcctattccgccatcttggaactgccccctcaattttttttttttttttttttttggagacggagtgtcactctgttgcccagggtggagtgcagtggcggggtgttggctcactgcaacctctgtctcccagattgaagcaattctcctgcttcagcctcccaagtagctggaactacaggtgcacgctgccacacccagctaattttttttgtattttagtaaagacagggtttcaccatgttgcccaggctgatcttgaactcctgagctcaggtaatccacctgcctctagcaccaaagtactagaattacaggcttgagccaccactcctggcccatgattcccattttttaggcaacaaaactaaggctcaaagtggttaagtcacttattcaagttcatacaaccaataagtagaaagtcaagctttctactcagaaggcagcctccagggtctatactcatgcccactataatctaaaaatctctcagtatgagaaacttcttctaaccaagattgtgaagtgacagaaacatacttcatacttttttcctcttggtagtggaccagaattaagactgggcttttcctgtaatgggcaccatttcagtgccacagtaacagccaggatgtggatttctaccttccttcttagagagggtgaggacacttctgcaataatgggacatgtctgcatgagatgcgtattatttttgctaggttgcaccattgaaacaggttctgaaaacaaggaagatcagtgccaagatccgtttaaatttctatatattcatctgatttaatccttaaaactgtatctgtcctgctggaaaattagctaatcaacttaagagactcctcccatcccctcttctcttctcaaccaactctaactctgtggttaagtatgaagcacagaaggttaaaaatcctggattctttccctaggtctgctactgcatgacctaggtcaaatcatttaaccatcccgtgcctcagcttcatcatctgtacattatagacttcttccagatcgaaaactctgatattctagctcactgcattctgtgtggacatttctataaattccatgaatattctaacagaataagaaaaacttcatgagaatagggaccataatcatcttaaacaccattgcacatgcaaaacttagcatttaatatgtgacctttaaatatttgttgaaattcagaaatgtaaaaatattccacaaatgtaaacacacaaaaacaaaaactaaatgtctcagaaagaagccctacatttggatcagtaaatgggggaatagccagacatatttaatgtataatttagacatttttggagaaagacctgctaatgagccccttctttcagagatttaacttttcaaagcttgcaaaaacattttctcctcctgcagttttaaatgtaattcattataagctgaaagttgtcaataaatgtatctaatgcacataagaaaagtgctattacagcatcattgtccttactcctatagcccagcctcacctaatataatggaaaactaaaatgctatctagacttatgcattatcttgtcaggaagcacctttgtctcactggtacctgtacttcgtagcacgtcacccaatttgatatgccaacattaaacttgggcacacatacatattcacatttaatagtatctttatcttgggaattcaaaataaccaattatggaatgctatggaatcttgaaagttgttctgcaaaatttctagatcaaatctaaacaactacaacctactttttggcaattttttttttttttttttttttttttttttttttttaaaaacggagtcttgctctgtcgcccaggctggagtgcagtggcatgatctcggctcactgcaagctccgcctccagggttcacgccattctcctgcctcagcctcccgagtagctgggactacaggcgcccgccactgcgcccagctaatttttttttgtatttttagtagagacggggtttcaccgtggtctcgatctcctgacctcgtgatccacccgcctcggcctcccaaagtgctgggattacaggtgtgagccaccatgcccggccagcaaatttttaattttctatttcattttattttttagtttggaaaggagagctttatttcctataaagggttgcagcctgcagggtggccatccttggcagatattttgaaactgaaattattaacttgagtttattaataacttggtgataatggccaggggctccattaagttgtacctaaggggaaaagatagtgaagaggcaaaattaagaggctgctatagtcatgctctcatgaaacttgcaatctactctttgagccagaaataatacagagagaggtagaacaggataaacgtggttatgcagtgctcatttcattgaagcacagggaaaataaataatttaaatgagctgggtaggtttaaaaaaaaaaggtataaagaagtggttcttgagtttttccttggataggagaagccaaataagaaagacataaggttgacagtgggagtggtattggggtaggtgaaaggcagaacctcaattccaccataaatggtgataaaatgtaagtccatcagttacatagtaaagaaaaattatggcaaagttttataccagcccttaaggaagctaagctgcagaaaagatacagagaagacaaatcatatttcacctaatatgtcctaaaacactttacagcttttaggggcacagttgaagaccattgatctaatccaatgttttcattttaatcatgagaaaactgagtcccaaagatgttaactgattcctctaaggtcacgtggtagctttaatggccaagacaggactggaatctagatcattctattacatcactgcatttcctgagtttcattttagcatgaatattctcccttgccacatacttatcataaaataacaagatcccattattctcatcctgaccttactgtgtccatgtctgcctgagttgctaataaataacaaaagttgtttccagatttgaataggccctagtagagaatagtgcttagagatgtatcagcaaactcacagggggtaggggtagggattggacaagaagaagtcagtgtttacacaattgagcatagcttttactgttgactggacagctgttccgtctagagcttcttaacccagaaaattactcaattatcaaaagggcacattgattcaccagctgtacattgctaagactttctaatatttaaaagtcataaaggttaccacacttcaaaagatgttattgaatgttactattgcttcacagaaattgatctgtcactatttattcaactattcattcagttgaactcagtgaagagaacctcactgcactgtaaatatttaaatggctcttgttggagacaaagtgaataagcctaagtaggctgggagcagcactggctcaatctgagaacaaatattccgaataaagagcccaactttgcatccaggatgccagcctcaagcagctctattatcaagaacaccttccaagttcacgttgtctgtgcttgagacatacggatgtcccattttaaacttaacaaataaaagtactaagaaagtggtgagaggagtgtagaggaaaataataaactcctaattcttcctaaatctgaagcattaggaaataaagtaacaaaccagttttcctttctgacctcaagcaaatgattgactttagagcccacaatgacctgcttagagctatttagagtgtcaagggccacctagtttcatgtcgttgaacaggtaacaaagcgcaggaaaggagaggcttgggtactgggggataaagtttgtatcaaattgcatcctgaaatctcagccttttccaaacaaatgtaaatacttagctgcatctgaatcattcattttgaaaacccaacagaccttttcctgcgcaagcaggagagattaaagcaacaataccagatgctttgctcaactgatttcctagattgagctgacaaaactattcttgtagaaatctagtcttgcctcctttcacttacagaactgaaatgcctctgtaggttatggagcaaaagaaacccagtggaagggctagagaaatcctactagaggtgacatacctagagctgaaaggtctgagttaggaccacatattgattggctttattgatggtatgataattttcaggtttagtttagctcttcatctgcccatgaccaactttacctgtgactgtggctcttcaccacactgccaccaacccacttggccttcatgtggttacacaaatggaatggaaggtcctaggttttctttaactgtattcacttactcatttattaaatcactgaatctcttactcttgcatccccatttattcagccaacaagccttaatgagtagaaaaggcaggcatgatgctataatggagatgagaaagataaaacgctttgcacagctaggtggtacttgccttgccagagatggagaaggagactgggggcagactggactatctgtaactttggttaggagagctggaagcctccactggatcactggccttgagaagtggtagaggaacaagacaggaattaatcaggaggaaggggcattccacatagagggaatggtagctatgaaggcaaataagcactgaaggtcttgctatgcttggggaagggtggaaagttccatatgcctggagagtaggcagagatgaaaggaaaggcacaaggagtggccagggggttgaaagaattaagactggtgaaataagtcaccgtctaagggtgatatgttttcacctccatcactcctctgaaactgcttttgccaaaattaccaataaaccttattacaacggaatacatgggtaattttcaggcctcattttacttatcatctaggctagtattgtaccaaagggtgggagatgagagttcatgtcaggtgcaggcaacagggagtacattgtccccaaacgatttaaagacagtaataaaaactgacaaaaattgatcggctttctattatcacaatgcaccagcaattccaaacaatgttagtataaaaaactcctctcgaaaccctttggttgatcttagttctaatcaattgctatgcttactgttacattttagtaatataattatatgcatatattatgtcatgttgtatgggtatgtatgccaacttcaaataagaacacttgtattacttatcctttaataaacatcatatatacctgaaagctattctcaggagtttgcagttacatagtctactccagacacacatggacttagcacgcgtgttcatttcaaaagtaaattcataatgattcagagtcagtcaagcttgctttgagcagttaacgtttccatctctgtactacacaccctgttgtaaacatgctatgtttaatcaggagattcaaaataaacaatgacagcacagagactgtaaagacaaagaaacaaaaattgagttattttaattctgtcattgtgttaccactaggagtttttatttgtatttaaaattgaaaacagtgaaagagtgcaaactgtgagatgttcattattgagttggttgttaagcacagattttaattcatacgtgaaataatgtactgaatctgaataatatccttaaaattgaaattcattctttttaaattgtactcattttaaaattaaataacaaatcaagaaaacaaagatggttgcatgatgataattgaaaacagtttcaccataaggtggagagagttgctctgggtgtcaaccacaccaggtgcaccacagattaaggctgcatacaagccttgtgctcactccatccttctctgaacactcttttcctttggttttcatgaaacatgctctcccaactttttcctagctagtggtctctccagcagtgttcacacctcctcatccctgaaaacatcatatttctcagtgttctgtgctagctaggtcgtcatctgttcttaacctacaaggcttctgaacgatctggcttcaataaccaactgtatgctgacgactctcaaatctattccttagctcaaatctctctcccgaaataagctgtttacctaactctctactgagcatcttcttttgaacataacttagacatctccaatccaattgtctgaaactgagttcattaacttcacctcctccttgatcggtctggtaaactaggaaccatccttgattcacccttttccttcctcaccccttggcctctcaatcacccaggctgacaaatatctctcctaaatatcccttatctgcttctttgttgtcacaaccattacgctggctacaccaccactctcctgcatagctccaatagtcattttctacattgtagacagagctctttctgaagagtaaattggatcacatcaccaacctgcttagcactgtttaataacttccatagtctttatttacaagacagaggtaaagaggtctccttttacctttacagccttatctctgagccactgtaatcttacttcagttcttttaatatgtttcaggtggccaggcgcagtggctcacgcttgtaatcccagcactttggaagatggagacgggcagattacctgaggtcaggagttcaagaccagcctggtcaacatggcaaaaccccgtctctactaaaaatgcaaaaattagccagatgtggtggtgctcacctgtagtccaagctactcaggaggctgacacagaagaattgcttgaacccgggaggcggaagtttcagtgagccgagatcgcgccactgcatgcactccagcctgggcaacagagcaagactccgtctcaaaaataaataaataaataaataaataaataaataaaatgtttcaggttctctcttgtctccaaaccattgctaatgctatttccatgtctgatgttccaaggaaaatattatttcctctagaaagcccgactgcctctcagatttgttaggtgctttcctactgcaccctgtcagagcacaaaatggtaatcgcagtttgtctgtcccccttattagtctttaagcgaattagactttaaattctaaaagcagctatcagatctgtcttggtcctcattgtattcctaggaccttgctgtagagtgggtgctaataaatatttttgttaagtgaatgaatgtatgtatgaattgctttggctctaactggaatttgtctataccatggatcgtggatgctttgtctatggcttataatatcaattgttccattttgacttatttcattcctagaaaatttgtcctatgctttgttatttataatcacattaatgatttatttcagaatatactgtaatataaaaaatgatgcatgctaaataaaatctggcaggtttttttttttccccaccattaggaaggaaatggaggtgtaaatacatttaaaattcaccatggggtgatggaatgcacgacttttgggcaaccttaaaactgtcctttcaattttaaatccacacaccaacagaggggataattttaagtctctctttgttgagagcttcaggggagagtgtgtagagtggattttttctgattcaaaatgaagagatacatgaaaactaccaaagtcaaggcacttcatagagaaaagtatgatgctttcattgctgaagagacccaactaaagtctaatgcagaggatgagaaagaaagagggcttgtcatattcttcagccagcacaaccttcccttcatgtttacatcaacagcagtggtgcctcccggtctgatgtttacataaagctgagagtcaactggataccctggctccatgctggcccaaggcagagctgaccacagcaggtaacaggcacctggacggggctccccatgggccatcaggggttctcatcagcttctcttagccggcagattttgaacagtgggtatgttccaaatgtgtcagggcatatttttcaaacatcactgcagattcattcgttatgtcttgcctttttttagaccttgacaataaagggacagttttaaccaaggaagggaaagagaagctcgtgcacactgatattttatgacatgctaggatccacagtgagattaacctatttctttgagatctttggggtcctattttctctgactcctcattattttcctttccaagacagcaattacatcttcaaaggaggaagattcacaccacactttcatgtttatgtgctctgaattcctatgtatttcaaagtgtataccttaaggtaaactttgaaaaaacacaggccactgtattctgctccagttgtgtgtgtgtgtgtgtgtgtgtgtgtgtgtgtgtgtgtgtctcaacttagaatatgcacacctcaagcacaagaatcttctctttgctttattattctccacaggaaatacttgatactaaaattttcacatgcacataaaaaagacaaagatctgtaacatattttgtgcatgtttagtgaagcctgcacttaccctaggaagacatttagaggaacagaatttagagaattaaaatggactttttcgtatttcattatttcccatgtagtagcaagtaatgtattacattcttagggcttctgtaaaaaatcaccataaacttggtggcttaaaacaatagaaatttattctctcactgttctggagaccagaagtccaaaatcagttacacggggccaaaatcaagatgtctgcagggacacattccttccagatgctctcagagagaacctgttcccagcttctcccagcttctggtggctgccaacgtgtcttggcttgtggccccatcactccaatgtctgcctctgtggtcacattgcttttttctctgctgtctgtgtcaagtctccctgctgcctctctctcataaagacttgtaattgcatttggtacctgtctgaataatccatggtaatcttcccatctgaaactcttaaccttaatcatatctacaaacaatattttaccatctaaggtaacagtcacaggttccaggtattaagagatggacatccatttaaggactatattcagcctaccacaggtggtgaaggcattgtcttaataaaaacaaatttcctctggggtgcaagcaagccaagggaaacagaagataagaagtacaagctgtgatagaaagaactgccctcaataaaaatttcatgctgaccctgtaattcagaaatcaatgcaaaaataagctcctgactctggaagaggattgtgtttcaaaattttgtgagtcggttgtttaaagttgggatcttacatcacttttctatagaaataataatacttaagacaattttgattctagtgagccactaaagctaattagacataactgaggtatagaaatagtttacttttgtcttctaagaatctattctatggaaataatcagaatgcaaaaactcaaaatgtgttgtgaagatgtttttagccacattatgtaccatagcataaaaaaagatagaagggagaacttaaatatgcaacaacatggaaaggtttatgcaaattatagaatatccacatgatggaatgttatgcaaccatattaagttgaggtaaaattgttaaagacatgagaaaatgtgcatacaacactgaagtgaaatattgacaatattttttgctcgtgaatctgtgatttggacagagctcagtagggacagcttttctcttctccacttggcatcaactacagcagctcagaggctggaatcatctgaaggctcactcactcatatgtccagcaatggataccgctgtcagaacacctacacctaggctttcaatgtgaccttgccttcctcacaacacagtggctgggttccaagaatcgtgtcccaagaatgaaagccagacagaaccgtatcacctttcatgacctgaccattaaagccaggtaatgccacttttgtcaccttgcattcaccaaggcagtcccaaggcctggccagttctagatggaggtaaaatatgaccccaccccttatacagaggcaaggttctgacactagaaatattgtctggtcatttttggaaaatagagcctctcacacaacgacacaagctatatacaaagcataattctgataatgttaaacacaaaatcgtaattactaaacacataactaaacacataaacacattagaaggaagtagtaatattttatataaatataaataactaattttctttctatcttggtggtagaactatgggtcatttttattctccatgtgctttttggaattcattataaattttagcatcaaatatatttgctgtgagtgaaaatacaaactgacttattagaacagagagcatgtgaacagcacttaatacatcacccttatatgtaatatattatgtaatcctggcaataatctggtgggcaaaggagacaaaactcattttcaggccaagaatctgagactcagacaagcttactgctagtttgtggtggatctggacctcgaataccaggcttttgactccaaagtcttgtttcctagtgtattctcgttccatggtttctcctttaaatggattggaaattgcagctaatgtgtgtcatcctccaggcgagaatctctctgccatcttcatgctcttcattgccatagtcataaatgatccctcttccctctccatagcatcttttttgtcctagaggtaggtcttgggaaagggagaatgaaaaccttggagaagcttctgaaaaggttcaggaaaaagagaatggggaaaggcagaagtttgagatgagggcttgggagaattctcttgcagtgagaaacataagcaggagtataggggcaattttggcttctgttgaaagagggctgaaatagcacagggagggattgaagcatgccttgatccttgactacactgatgctgagataagatagatgagaaaaaagagagcagggacaactttcagaaggatggtcgtttctataaggaagaggagaagtttcataggatagagcagtaaaggagtgattttccagttctaggagctgttcataaagaaatgaaggattttcataatgtgagtgctggtaaatcagaaattgccactaaatctggggggaaaaaaggctatttagcttaagaattcaatggaaattaaatgaattgaaacaaccccaaatttttttttgagttgaactttgctttagaatatatttaggtttaagtggaatatctcatttttttaaaaggaagaacttagtcatataaacaaactgaaataataaaatcagtaaatgtgtatgggtatacagttatctgatactataagcaagcatccttctgttgctatacagatcctagatgaaagaactcatcctcattcattttgagtcctacggagtcagcagtaccaaactccatcaatcccttattagacctcatcatcttccttccagtatgcagatagagcttattttacaaactaagcctttttcttgagattggtaaatattgtttgagcccttaagcccttaattttcgcatctagcctattgtccatagtctgaagagggaaagcaaacattaagatataatcaaatttaattttgtgatcaaaagatcagtgttctatgctccagaaaatcaagtataaaaggaagacatttaatgaatgctcaccaacgtttctgattcttcttctcctaggcctattatgtaattacatttccatcccctttaggttgaggagaccagtactttgattagtgcaatgcaaggagaagtgtttggtcctttaacagttagggctccattcaccacattctttcccctctgccatgataaccagtgacatttacagatagtggaggcttcatcaccctcggcaccagagagaggatgaggtggaacagtgtcccctgccaacccaggatgggcaggtatcaaaaaaattaaataaacttttttggttctccgtcacggagagtttagacttgtgtgatactgccacacagtctttcactggattcatacattcggtgaaactggtgggcttagaaatgatggttaaacatttcttgagcatcagaggggcaggaaatttaaattactagaaggtaagcttccagcctctgaacatgtatcaaaaacaagtgaaggaaaacttatctccacacaaaaccctgaacactagtagcagcttcataaataattgtaaaattttggaagcaaccgaggcatcttttaataagctaatggataatcaaactgtgttacatcccatacaatggaatattattcggtaataaaaagaagtgagatattaagccacaaaaagacaggaagaaaccttaaatgcacattactaagtggatgcgtcactctgaaaaggcgacacactgtatgatttcaactacgtgacagtattgtaaagggcaaaactggtggcagtaatcagccattgtcaagggcttatcgtagagatgaaggtagggatgggtgaatcacaggggagttttagggcagtgaaactattctattgccaaaacccatagaacgtataacacaaagagtgaagcccaatgtaaactatggacattagttaataacaaggtatcaatactggttcatcagttgtaataggtatatcatattaatcaagatgttaatttaagggaaaccaggggagttggaagagggggtatctggaaaaatctttgcactttctgtttagcttttctgtaaacctaaaactgctcaaaaattcagctagaaaagcaaataaaggatattttaacttaacaaaataccaaagatccatttacgtgattacaaagtgaagaggtaagtggtggcaggttgttgaattgagggttggtctggtgggcttaattgtggaatacttcgacgcacacaaagggtcatacatttggatattatccagaagaggacataaaaaaaatgaatgagcttcttggagagaagagcataaaagactaaggtaaactgtggtaagaaagaatagtcttgagaagtaattgtaagtgattttgtcctcatgaccagaaatatgccatcctatggacagaaataatactgcatcaaaacactgcttaagcaagttaccctgcaggaatgttaattccagtatacatttatttggtaatcagagataagtaggagagattcacttttgtaatggcaaagccgatctttccaaaatgcctcacagtggaaaggaggtttgcagtgtgtgaggaaccctgctaacgcccactcaagtgcaacaatataactggtaaaaattatttaaaaagacaaaaacaaaaaaacaggccaggcacggtggctcatgcctgtaatcccagcactttgggaggccaaaaccggcagatcacttgaggccaggagttcaagaccagcctggccaacatagggaaaccccacctctattaaaattcaaaaattagccaggtgtggtggcgcacgcctgtaatcccagctacttgggaggctgaagcatgagaatcacttaaacctgggaggcagaggctgcagtgagctaagatcttgctactacactccagcctgggcgacagagttagactctgtctgaaaaaaattaaacgaaacaaaacaaaaccaaaccgtctgttttgctaacgtgatatggcatacgaagaaacagtaataaagaaaatttcttaaatctagataagaaaaatgagagtccatggcactagagccatggcctgctcctactctccctcacagtttaatgtgatgaagctccactcaagttgggtgtggccaggaagatgaggttctccctcctcagcctctagttaaggatgacggtatctctttgggattggcaggaatttctcatccctgtgaagctccatgttacaggggctaaattccaggcaaatttctttggaaatcaggggctgtcttcctctacccacccccgccttctcttgcctccactctaggtgtgccaggccaagaatacttgagtgtcattgccttcacctctgctcactcataggatagaggttccccactggaaaaacaagctgaaaagaccagaggcaactgtctctacccagctccctgcttccaaagcaggggtgtcactctgcgagaagtaggccactatctctgtccccagatctcaagcagtggctgagaaattttgcctaggggatgtggcaggccataagaacaaaagggcatattcttttttctaattgctaaggcaatttgggtacctaggcatgatgtttgatggtatatttcttaggttgctatttggtttggtttagaggggggagaacgtggttgataaggcctcttatctctctgtagtccacagtttcaaatcccaattctaccagtttacaaccttacccaagggggaaagatgctgagaaaaacaaattttattttaaatatgcagactcacaagaaacttcctgtcttccatgagagtaaaaaagtacgactatcctctatatagttaggttagaagtcttcttggtttcctcaagctagaaaggagcttataggaagagaacagcatagggaagatccccctttccttagcaaagctagggacattgtaattcgaacttctctgtcctcctgctaaatacatctagctgtctccatggtccttgtaagtccatagatacccacctgaaaatgccccctttatttgagaaatacagtcttgaagcatggcctcatattggacagagatcataatgagtcctctttctcagtatttcttggtgagggaagagggactattccatccccactgtaaacagatctcctcatcctggatatgctctatatttacattgttcagagccatctggaatgatctagaatataacaagagtgatatcaacccagaccttactttctctctttggggtggggtggggataggaaatgaggtttttgaggagggcaaataaaatgcaatagttaaaaaataaaatgttgattacattaatttctggcatcagaataaaaggaaatcataactatcagcacagctccccagctactcgggaggctgaggtaggagaagtgcttgaacccaggaggcggaggttgcagggagctgagatggcaccactgcactccagactgggggacaaagcaagactctgtctaaaaaacaaaaacaaaaacaaaaacaaaaaatgtatgtactaggcactcactgaatgtaagattaagaagatgcactttcttgccttcagaaggaatacaaagttacaaagtatgttgttaaccattgtaataagtgcaataagcatttggtatttcaaagggctgagaaacacactctgtccgacaatagtgaattagggagggagggcttctttgaggaagtaaatgtgttaggtttgaaagatgaacaggagtttaccaggttcccaatgagcaaaggaaggaagtattttaggcagagaatgttacatgactgaagtcactgatgccaagaaagcaggagcactcaggaaatagtgatacaaagttgatataagagataagcttttgttttcacatcaatttaatacacttttattaagcacccaccgaatcaccaaaaacctggtggtttggtcttcatagataagttgccaccctcaaagccctctactgaaggcgcactcatgctacgtgccaagttcataagtgacactggtttcttgcatttccataccgccacggacccggatttccttggggatctgaaatagcctaatgctaattccagcttctatgctggtgagggtattatcagcaaggaattagttgaaccatactcagcaggagagtatattctctgctatgattgattctggatagttcagaagaatgcaatcctatgaaacatgatatattcattggctaattttcaggacagaccatgaattctgatcccaggctcaccgcagtactatcgtcagcttccctgataaaagcaaagcttctgagatgctcttgctattgtttggaggaaggtatggttcagcaggtaattaggtttttattggcaaaatctgcaaagttcccattctcgttttaagaaccagtttctcttatcaggactttcctagtagagatcatatttctgcaggagatttgagaaggcagaagggagaatgtctgacctggcccagatagatcatgagccctaggctagaggtgactagggaggctgggacttgcctcagggacgtggttgcgcccctacattatacattacttagtttccttccagacagggaggggagcctttcatttttttgtttgagatcacctttcattcattctctcatttggcatacatttgttgagtaactgctatgtatcaagatatgaaccaggtggctcatgcctgtaattctagcactttgggaggctgaggtgggcagatcacttgaggtcagagacgggcatggtggtgcacgcctgtaatcccagctactggaggggctgaggcaggagacgggcttgaacccgggaggcggaagttgcagtgagccaagatcgcaccactgcactccagcctaggggacagagcaagtctctttctcaaaaagaaaaaaaaaaaaaaagagatatatactgggcactcactgaatgtaagattaagaagatacactttattgtctttaaaaggaatgcaaagttacaaagtatgttgttaaccattgtaataagtgcaataagcatttggtattgcaaagggctgagaaacacactccgtcctacaatagtgaattagggagggagggcttctttgaggaagtaaatgtgttaaagttttaaagatgaatagtttactaggttcagaatgagcaaaggaaggaggtattttaggcagagaatgttacgtgactgaaggcactgatgccaagaaagcaggagcactcaggaaatagtgagttcttatttgggaatgtttgaatatggaatgattggtgatgatgcacagaatgctgttagagggtaggagaacgagttgaaaaggtgaaaatgcaggcagagccagaagtctaaggagcttggaggacacagaattaaccccatgggctcacactggacactagtagttgtatcacttttgttcggctaacacatggatttttcttgttttaaaaatatttgaactagaataactttacctcctccatttaaggtagagccaccccttcctacagtattccaccagaagccttacattctttactactcccccaggcccctaaagacaagtgagtgtgcaatttcatgagcaataaaaagtcaccagaggattttaggcagatttaacagatttgtattttagaatgattgctctagcaatagtggctattatcacaactgggaaggggaagcaggcccaagtagatgctagagcaataactgaggtgagacatgataacgctctgggttaaggcaaaagatatgggttgtaagctacagattaggaaagtcttcaaaaagtggctagcgtaagaagaatctgctgaggaccaacatttttagaaataagcaaattcccaacaaagggatagaagaacaaactggggagaatggctgtatactgaattcaagattggggcatgttgaaatttagctaataggttgacaagctggatattcatgagtggtaggaaacagaagacaactagacaattagaaggaacttggaatacagtatgaggtgcttgaagacatagggatggctgtttctgctcaagatgtaatgaaggaagagacagctgtaaggcagaatatcggcagttatgggaaaataaatctgttatgagaccagatgaaattagcattaagaagagaactaggagacactgggttgtgaaaaccaaagagaaaaatgggtcaatggcttgcccaggccagaaatgcaagtagaaggagttgctgcttctgactcaggcctgcctgttttctgagtgatttttgattgctacactcttggtatatatcatctataatagtcaaagtaggccagaacttcacccttaagcatctcagtctccccagaacaggcctttccagagtgaactacaagcaggaaatctccccttcagagggctgtctattctttggcaggtagacctgactttagtagtaaaggcacaaaattctctgggatgcaagcaattccaaagggatctaaaagaccatccctgctgcttactttggaaagattatcatgattatctttattagcacagaactatgtaaagtgaggtagattttattatggaggtgaaagtgtgggtaggagcaggtaatcatgcttgagcccactaagccctaaattcatctaccctctctctggtcagactatccccagagtttagccatgtgtaagtccccattcttgactccacttaggagataaaaatctctttgtggatgttgttgggggtggggaatggaagcttcccccctgccccgacattgttgtcaactgtccttagaaaagcagaaaagagcaaagagctctatggacaaaagcccagatttttatggacacagggaaaggccactgcagctttaaagaaacactttctctgttgaagtggggtcggaaatgtaatggaagtaggtagcaaactcaaaggtatggtcttgtgagaaaaagtatttatttgttataggaaagcaatcagggaaaagggagagaaaggccttcgctagagatctaaagcttattgatcagtgtgtgttacagcattgaacccactggtattattcccatactttagtctctcccacagactggattgagcccgtttttatccacattaggctatcagcactctaagtgcttttctaatggacatttcccccccaaaagtaaggtaattgaaaggagaaagccatgatttagaagttgcggaagtggcgaaggtttgtattacaactttggtttttgaaagtgactacaaaattatgaaggggagagaaacaggatctctcccagtttacctaagcatttctatatactcaaagacaccactgtgaatcaaacaagaacataagaaaactcagaagacatgggcagagaagcaaaatggccaggtacgatgtaaaatgtaatgaggctagctagcacatccaacctggtgctaaaagtcttttaaggacttgaagctagcttgtggaaagatcagctattaatgtttgccagaggcaacccttaggcctttagagaaaattgtagttttccaatgataagaaaattaccccatggttctattcttgaattattttatcaattagctaagggaaaatacaatctcagacaatgcactgtacctgcactgcggctctattgtgtggcatcgttcacatagctttccaaaaatgtgggctatgacaactataaaacgttaggtcattttcttttccagatgtgatctcagaggtgaatgtttctcagctgaagtgaggaaaatgaatattccaaaaggattgcagcttttcttaaggtttggaacacataccaatgaagtttggtaaaggcaacagagggaaagcaggtggttgtctaggactttgtgtcaacataaaggctgtaagaagacttttgaatgtctcaaaaattctcttctgactgcaaaggtatactatttcaaaatttggtttactgattaaaaggtttatatgcgtacttttagacactcataagaggacatcaaaagtgcaacagcacctccccaggactggaatttatgggactctatttcctattattcggcctccaactcaagtacataaattttggcttttagagtgagagtctttaacttatttatgaagatggaatctgaaaaatgttgtagatattgttgtgccagccacttatagagaattggagtattaaatgatgctaaatgatgccaaaagcttcctctaccaacccttataaggtgaggtagtattagatacaagttttatggaataaacaaaaaaattaccagtatgcttaataatgaacatttaaaacctgtttcctacagccaaacaggtcatagttgagtgataccagtggtaggaaaataaatttcaaaattacttttgttgatgattttccacactaacaagcttgaaatagaaccttatatagtatgtgattttaatctgaattgatttttaaagaccctccatattaaagtcacaggcactattttataatcaagaatagctaactggtgcttctcttcataaaaatccctcctgggcaattcactacttgatgcacttgtcagggtttttcaccatgtaaataaaagaagacatggttgtgcatctctcattctgttattatacaaatagcaagatgcaatttttcaacattttaataatgtagaacagcaggaagtatttttattacttgaacatttttagacatttataaacctattaagagagaagctgcatggattacaatagacctatctgggtcccaggaaacagaattcctctttgggaaaatgtctttctcataaattatcattatttgtaaaaataaaaattcctaagctgttaagtttacctgggtacaaagtttttttttttttcttggaatccactggtctctaatacttattgagtatgtatgttgcttatcaattactcattacctatacacatacagcatatatttaaacatgtaaacacgtgtatatacatacacattcatttttggaaaattattaaactcctttttcttttatttaaaataaaccacacccattaaaaactggataaaagccttctgataaagtcttatcctaaaatgaagtgtgtatgtatatacatatagtcaacattaattttgaatactgcacaaactattttctagtttaaaaatttacagtgatcaactagttacacactgaatcatgggagaaaggccataggctgattgtcactttgagttatgccttaattaccctgtttctagtgcactaacttgccagccaccttcttttttgtcccctttatttttctaagaagggcaaaacatccttgaagatcactgttatattcatagcaatgtgttttacgtttatggaaaacctaaaaaccagagaaagcccacaaaataacagtcatttcaaaccagagacaatgcattttttctcatttattcaaattcactgcaggaagtaaacactaaaagattaaaaaacaaaacaaaaaaattcacactgcagtatgtacagtttcatgacatcacatgaagaaattaaatttctaataaaaatggcaaattatattactgagcagatcgcatcaaatttggttgtgtaaacaccagaattcttactatgaatggtaatgtgcctatattccagtattgctaatactgggatactcttggaataatgtttgcaatgggattaaaaaattcatgaaagtagttgtgtgaattctttatgtttaaaagtggttgacgattaaaaaaattctttaagacccttcgaatcaaagcacattctttcacaaagcttaaaccacagacgtcatgtccagaaatggaatactgtcatgttaggatgaacatctgatctgatttgttaagacattttgccaaatgcacagatgcacagggtcccccatgcacttttcatgcagcaggtaatcacaacttaaataaaaggtttattctatacatttgtccagacttgcaactgtatacatacatgcacaacttttaaacctgtctgattatatttacacttatacatggaatatacaggaaccaaagagattaaaaggcttttctgttgcattagaacaatacaaaatatgtatttttcattaaggaaatcactatttacatcacctttaaaaaccgattttaacatcttcatgtaacaagtcaatatatatatatatacatattatatatatatatatatatatatatataaaatatatactctcaccagtttactcttctgtaagatgcagcagagaataaacaggtaatgaatgctaccttactgatgtcaataagctgtagtaccctttcacaaatgactttattagaagaaattgtctagatatctaaaatagtccttgaaaatgtgtatatgtgcatccttgtatctacatatgcataaacaaagtgaatctgtggatgtatgccctttctcactgttctttaaaatcaccctaaattcaaattgggaacattctctagtaaatcagaacagcattcttcgtggtcatgtttatttaagtattacatattctcattcctttgttaacaacaacgaaaacaaccagccaaccaaaaaaacaaaacaaaacccacacacacacacacaaaagtagcaatgctggcccttggtcttttccctgacctaaatttcactctcttgtaaaaaggtcatttccccctacccaagggagaataccaacatattttttctgacatacctctaaggctccaaaccttccacaacgatcaagaaaaatgacttgtttaaaagcttatttatatagtgttgacaataagattgtcatagtatggacatggaatagaatatattcaactggccagtggaattttatgtcagaataagcctatgccttcacttctccatgatgttgcataatacccactcctattactgtataatatttccagtagctatttacaaatcattctgaggaaaaataaccatttagggttttagatcatattaggaaatcacacctatttttaatataaaaatcttagaaaccacttcaagtagaacaattttaaatcaatatcctaactagtagtgattatagaataatttttgataggtcatttgctaacctggttcacaattaagaacaaaatatctggtgaatgaattgtggattgtacaaactgaacataaaaacagacctgtttcgcaactgaaaccccatgtggcttcactaatatattaatttcttctaagacagtatcaacatgtacttttcatcactactttaaagtaaaagatccaatggagtgattgtgtacaattctgtcacgtatatgtgccctttgtactttttatttagtcaatctgagtttagtgcccttcttgggtttaaactaaatgttgtaagctttgttggcattgttcttaggacaatggttttaataaaggttaaggatgcattcaggagaagtttccaaaccatcctggaatcacctgagtttggtaagtggccctgtttttccatccctaaggctaactaagtagatgttactcattagaacacacaaataatcacagattttcctgagatgttgagccagatatgaaagttatcccctccacccaatttttgtcataaaaagtgttctgaacccgatttccaaagacataacggtaatatatgaactacaatattgcaaattttgagctgatgtgtgactgtattggggaaaatagaggcatcacatagttttttgtttttgttttacagtctcatgttctgaggaaagtcataagtcatggttctcaaacacaagaaacacctagagagcatgttaagatgcagatggaagattccaggtccacttagcagagattcttgttctgtagatctgagatgctgcctatgaatctgcattttaaaacaagtgctccagatggttctaatgcaagtggtctgagttcaggtttaaggaatcctggtcataacactcgcaggtaccacaggaatggtgagaattaacttttacaagagatggtgaaaactgtccaaagaaaagccattttgcttctgttaaaaacaatttcttaaatattcaacttttcaggaaaccacctaaagataaatgttaacttttctaattctgtaaaaggaggagtattaatttagtaaagtagttaaaatacaaaaaatggaaatctgccttttttttaaaggatctatcaaacttccctcaattgtaatcaatttttactaagtagcacaaggtttaaagaaatatatattgaaaaggatcagggtgggacagacacattgggaaccacaaaacctcttccaagagttaaaaataaacaccttttttttttctttttagcaaaagtgaaaaatgtaagcatatatttttctaatttatttttgaattggataataagctgtgaatcagcactaggtttttttttattggataattatcctttaaagagttgtttaacagtttagactttaaaaatgtgttatgtaggctgacttctgaaaagcaaaataaagtaccctaataaaggcagcaaaatgcattaatccactatgaatggagttttacattttaatttatgcctaatatttataaaagaatttcattcataggctactcacagttgttatctgatgcatacagaagtgttaaacaaccaattgctagttcagtagtttcctcatgacatctaatgttaagcaaaaattagtatgcatatttcaacatcaccagtaaccaatacttttcaaaatgaaaaaagtttcaattataccatgctttttttcaaatcatgctcttatttatacagatctcaagttcatactcattagttttaaaaagatccaaaactggatggcaggtacattttattctgattctttctttatcgttagcacgcttcccagaagtccataaacttctccatttgcgctgtgtgggcgagaagcattatttcccatatggctattgtaagggcttcttaaattaaagaaagaagctttcgtttctgcagtaggaagtaactcttctttggctgtgacctgtgagacactttcagcagatgaagcctccctccaaatgtccttgtcttgtgtttctcgactggtaacagaattgcctcctttttgaagcatgtaatatagtattgggttggttttggtcaatcttggagagtctttttcatactcattcttctccgcatcagtgataacccacttaatgggtcctttctcactgggcatggaacacccattcaaaagcccagattctggtctagaccctgcacagcccaagtgctcagggaaagtaggactcacaggagtttttactacacctgggtatgaaaatgtcctgttatccatgcaactgctgggctgagtggaactgtacatcagtccatttaaagaagaaatgctaaattcaggtttgctgttggtcacattatttttgtgtcctttctttttactgtcagccacagagttacttctgtgcggggacaaatctcgcacacagttttctgagagaagcagctgtttcagaacattaaagcttttgctctctctggcccaactcctgtgttcactttcgctggctgagccatgaccagcaggatatttaaattcaagatcatttctgctaaatttcagctcttcctggttaagcaaggacccatacagtacttctggggcactgtgattgtttgcagcatcaacaatgttgtttttcatctttttaaatggattttctaatggctcagtataaagcttccttttcttagggaccatgcaaagattctttgattctagaagtgccatttcattatttctgtgactcctgtctgaatcatctgccaggtaactatcttgattttgtcttagcaatcgacttagcagaccattcttggagaaagaaaaatcctgaggtgaaacaggctccgatttaaagtcttcggacactggtaaggcaggtgcgcttctctgcacagcaggagccatacccaagaatggggcactcttagcatcatggctcaagtgcacatttgtgttaggaatttgtaagtcatcacaaggctcagattttattttcaccatcagtatttgttcacttaaagctctctctgagtgttcctgagtactttcatctcttaagggagttttctcttttttttcactcttccctttgttggggttccccaggagcaactggaggacagtacgtctttcaagcagattttctatttcagaaccagaaagccctggttcaggacctgttggttgactactaaatgctttattttcttcaactgcatttgttttatttgagagcaaagggctatttaatctatcaatcatacctatcggtttatctgtgtttccagttaacagctgtttgctgggtctctgctcttccactgacatggatgactgcattccacattgtgctaaattttgtaacagcttactggcactaaacgttgcagagttctgtgcaccttcattttgggctggtttctctcctggtgggtctttgctttttgtaaggtccattgagtggttagatgcagtatttgttagcttttcagactgagtactgcagacatatggtggggaattccatttgatgaccagagagtgttgagagagattgatgggagaccctgctttgcttgatgtaagtaaaggtggagtgctcactggagtagtccgatttgtactggggctttctatcacagaagtccttgcataattttgtgtattgaacttgctcacatcattgtgtactccctgagggctggtgtttttttctacattttcttcattcttatggccaagtagcaattgaagaagtgttactttctggtgtgagtttagcttagaattctttgaggtatcttgatcttctttgatatctacatctgggacttttggatcccaagtgtttagcaaggattgagtgaagttatccagggaaacaggttggtcagattctgatttttcagttcggtgtttgcaagacaagtctatgggaacacagttggaataagaactttcatcaccactgctgtcatctgtaaaactaggattgttatctgaatattcatcaatagttgtaggtgtactactttcctcaaaaatgcttcctctctcactgtgactgtgtccattcattggcttaggtatagtctggcttttaagaagatgtaaaagcaaactattgttagcagcttgttttatattgtttctttccagtgagttcttataacctgcatttttaggggaagaaggaatgatacccattggattttgaaacactgtagcactacttttgctagccatcagtttgcttgatgatgttcttgcctgaccattaagatggcttgacattccttttgggagctggtaactgccaacatccttctggccattttcttgcaatctggccatagcagcaagtctttcacttgctgcttgatttgcattttgcgtttttaaagcgtgttctcgagaatactgctgcaaatgggcttcgcttgacagaagtaatgctaactggctacaagcaacactaggtttaggtgaggtggcaggactagcccttttttccaccatgcttgcaacagcctgtaatcttgcagcacatgacaacggttcactcatgacctttgttccactttgtccaacatgatgaggagactctgcaaacctatctctgatgaggtttttagtcacatcaggaagattcgtatcaggcttttgatctttaactttacttttcttcaacaaagtttttaagtgacttgatgcaacaccatagcaccttaaatccttctccacttttaaagaatcatgactgagggcatatccttgctccttgaggctctgcctgatttgttgtgacagagcaacagtctgcagcctagagctgaatgactgaagcaaagaggccagtaatgtgctatcctgtttgcctttaggcacactgtcaaccatgccagctagcaaagcttccttctttacgtttaaattcatgatagaatcagacagcctcttccgctttgctgcattccagtcctcagaagactgcaacagtctggcttttttgaggtgcagcatgccagacccctgatatgtatgtgtattgagaactggaccattactttgacaggtgggaaatgcactgccagaaatgttaaagttctgatcctcttcattatgcccagcagactttttgtcaacggcagtacctgatccccctgctgcctgatgcattagtaatccttctaggtaagttaaaacaatagaatcctggtgcacatcagagccaagctcttctccatgagtcatgttcaatagaagtgttcacaagggcttggtttctattcactttaaagaatggttttctgtggtgagtgcgatgtaactttaataaaggagtatcagtttatcaccttccatcgcaatcagagagagacgtactgttacattctgtccaagatttcttctggcaatgacaagataaatgcagtctgaccacagtgctgatcaacttctacgcaaggaggaggagaagaattccttaacacataggtctgtagcagtaagcagatagaatccttagtgaatatattccttttccttcttcatcttttgttccccattaaatgcaaatatcagtgttctaaaaaaaataaaaataagaatagttaaggaggcagaactagaatcacgttatgatacctacaagcaaaataatatagcatctgtaaatgtatatatatattacatataaataatagacatataaatggattatagtcactttagtaatttgttttattgccgttcctattcaattgaaaatgtctactggaaatcctgtgggttaatgcatactgttaaaatgatcaaatcattagagaagagaacatactttaatgttacatagccatcttccaaagccgccaagtctctgaattttcataagcacctttctgcaaagtaatgtgaatgttcagtctcctttatagctttatagctctacaggggaactagaacttgcttccttacattactgggcacttaggaagaaacaaaagtagatgtgcagaaaaaggaaaagagatgcagactctgatgagtctgatgtggggttgaggccaacagaacagattcatttctgacatcatcccccaaacaccagacattccataagtaatttttagaatttccgttttcaaaaaaatgaaaccactaacaagttgaagattattttgtgagtctgttcaaagtgtgaccatcttaatcatattcataaacattaaaatacagtcataaacttacctacccatactttttaccatgacttattaaagacagagaggagtgattctttagatgcttgttcagggctatcaagggtttaatgtagttcgttagtaaatccttactcatgtgctctatggagaagtcttaatgtcaggtccattccttacagatacagaagacagggagggcataaacatatataaaaagtacaatggagaatgccaaagacattttagtcacagtttgaaaaatattccaatgatatttattatctaagaagagaccaaaaaatttcctatcactaacacatacacaacagaagaagcaagaactcattgcatttctgaaaacttgataggtaagtgtcaaaattgacctaaggaaggggggccatgacacctttggaagagaagctggaataaattccatgcagtttgtttttcaagatgccagaacattttgtttaagttatcagacctgaagctatcaacaaataccttggtccctatggaatttaaaagataaattttaattgaaagactaccctgtagctttttaagtacaatgcttaactctaagtcaaactttaggaaataattatctgattgtatcaaattgttgaatttattgattaaaaggataagaaatgatagccaaagaaaaagatacagaaaggaggcagcaacaattaatttcaactgtgtaaggagtaggatgagaagagactttcttgagattccaatgccaccattttaagaagctttgccataatgtacttaagatggatattttaagaggttaataatgatatagaaatgaaatggttatcatgactgccaccaaatatccattctcccattttcatttactaataaaaccctgacttgtttttcagggagtagggaggtatcccagctaaacactacttttctcccccctctggttatattttacaattgatggcatgttgcttaattggaggcttatttttctttcttagtggtataaaacatacgggtacattttacaactgataacatcttggagttgaggaaacccagttttctaattctctcaaaaaacttaatatggccaggtacggtggctcacacctgtaatcccagcaatttaggaggccgaggtgggtggatcgcctgaggtcaggagtttgagaccaacctgaccaaaatggtgaaaccccatctctagtaaaaatacaaaaattagccgggtatggtggcatgcgcctgtagtcccagctactcaggaggctgaggcagaagaattgcttgaacctggtaggcagaggttgcagtgagccgagatcgtgccactgcactccagcctgggtgacagaatgacactctatctcaaaacaaacaaaacaaaaataacaactgctaatatacaattaattctcaactagttaagacatttaacaaccatttaatgggatatgcaagtccactgtatttctctccacaccactgccaacctttttgctcttgggtagactcaagaaagtcaaaatcataccagtcatttgaaaactggtttgtaaacagccataaaacatactttatttaagaataagaatgaaataaggagcatctttgagttcatattactcctgttattgctttctactttttactgtgcatgatataatttgcaaagtattattcattgctttaaaaagactgaatttacacatttctgaatttacaaagcagatttggaagttgatttaaaaaggaattatcacagtttccttgtaaaggagctctaacactgtattttaccatttatttacctctctaccatttatttcctatcttcacagagaaagtagatgacagatattaagaataatcatctcttaataatccattttttggcaatcagctttctcaggttgaaaatcatttcttacatatgaaaacaatttttaacttcaagaacgaaaatgacatatacaaataattttattaagctccttgggtctgaggactgtgctaattataattactacagtgcaacacagtcaacagataactgaaccttgggatacattaagttattcaatgaccaaattcccagtaggaaggaagggaatttgacattcaaacacacacattctctcactctcaaaaaatatatagatgagatactaaaataattcgaatcacaaatttgaaaccacacactgtagttcatcacttgaaggaatcacgaggagaaggtcattctaaatattcaattgtttatttcatttaaatcaatacaacatattcttactgaactcccaatctgcttcaagatctgtcttaggattggtgaattatgttcatttttaaaaagggatgtgatagacaacatctagagaaacaggcaaggtgaacatccacctttaagtttctagaacatctctaataataaaaatatcttctcctcatgctacttcttttcacattttcacatgactcttatatcaccaagcacaaaaaaattaaaaaatgtgatatgaaaaatcttccaaagattgttttaagatttttaaatgaaaactataaaacaaacatttttagttcagaaaatgtggttaccatagtatggataaaagtcactatgtgtatgcactaagctttcacactttcttctagagaagtggaccagtaacacatttagaatagatttaaaaggaagatgaataattgcttccaaaatattctaagtcaaggcagttatttttcattaatttctttgaaaaaaatcctataaaacgtaccaattacatgaagtagtggagaaaaaggattttcttatggagacctgttttttaaatgagataaatctgtaaatcaaagattgtggtcacgtggagaggctgcctcaggtgacacagcagcaacacctaccactgttctagcagaaaatgaagtgtctatcctaggaaagcaggaattcttacaccccttaaggcctgaacgcacttagctccttctattgaaagctcttcagggagcagagtgagccaaatttctttagatatcttccttttctatctcttaaactagagagggagaaatcactaacaatccttctcacctttcccaatccttgccttttcatttctatagtatagaatataattgagaaatatagcaaaaaaagaaaatgaggcacgatactaaatagtacagcttgttgggacctatggatttagggtattaaggtaaaatatgaccactacctaataaatagacgttttaaggttaaaatgttattttaagttattcaatattagcttaactcattttcttttagtgaaagacaaccacattattcatgaaattccaacatatagttctcttgcctggttttatataaatataacttaagaatgttgccaggtgtattcttgagtatatttagttaccaatacctaaaagtcaacacacatttaataattaggtttctttagagcagcagtccccaacctttttggcaccagagactggtttcatggaagataatttttgcatggagtagcggggtggagatggtttcaagatgaaactgttccacctcagatcatcaggcattagattcttataaacagtggggaacctagatccctcacatgtgcagtttacactagggttcgcacttctatgagaatctaatgctgccaccgatgtgacaggaggcggagctcaggcggtaatgcttgctggcccactgctcaccgcctgctgtgtggcccagttcctaacaggcttggcctgggggttgggaacccctgcttcagagaattgcaattaatgtatattttgaaactggaattgtttataaaatattgaatcctctggtttgttattttcttaattttgatggtgatttcattagagcttgtgcatgtgtctatttaaagttattaaacatttgcatcacagtaagggagagactttacttgtatggtatatacttgttaaataacttctaagtaaagaaaacagaacttttctagaatttggcttatggcggatgagaagaaccaaaggaagtaaaaatactaaagggacagaaaaagaaaaaaaaaagggaaaaatactaagaacaaataaaggcatcatgaattctgcaactctcatgaggtgccagaaggaaaaacttagtttacaaactaagtagattatattactagcctgcctttaaacattaggttggtagatatgacatgcaaagtgaagaaacatcttttatgaacactaaaaatgcatatatacaacgagaaaaaagtaaaacctacacaataatagaataaaagctaactcagtgatgtttgtttcaacttggctgtcatttttatagagtggttccataaaattttgaggaaaaaatggttaattttaacaaaaaatttagtataacattcaggataccaagaagtactaaattttgatttcagtattatcgtcttaagtgaaaatcagctcgcataattttttttttttttttgagacaagttctcattctgttgcccaggctggactgcagtggtgagatcacagctcactgcagcctcagcctcctggactcaagggattctcccacctcagtctcccaagcagccgggaatacaggtgtgtgccaccatgcagagctgattttttttttttttttttcctgtggagatggggatctcacaatgttgccaaggctcatcttgaactcttagcctcaagtggtcctcctgccttagcctctcaaagtgctgggattacaggcgtgaaccaccacacctggctcttttacaattttagttcattttaaccctcagtacaccaagaaaaacagtcatcatcatttatcatctgggtccaaaagacattttattaatatttaagttaattcatgaataatttacacaataagaataaagaaatgacacaaaacaacttcactgattttttttcataagaatttaaacataacattgtaattcaattcttcattccctgttttcctggttttgaaggagtatatatctgaaaaggacaaggcgctttgaaactgacagctcatcaacaggttcatggatgaacctggaaatatttataaatattgattccagatttcaggtatgtgtttaaaaggactcttgggtcttcttcttgtacttgaagaattcaaaatgtgttacttttgataattttaatagctcataatgatgttgaaaagatgacagaaatttctgcttcgtaattgcccaatatatttcatttttagactaacagcaattacaatgatcaatccaatgaattacttcatttctgtatcatctctttctttacaatctcctctatcaaacacctgccttaagtatctgtccacttacgaacagtgtcaaataaatttggtgttccaaaaatcataaaagatgaaagaatactgtcacacaccctttgaagaaaacagagccattgaagtttttgccacaaaacacttgagtgttgaataccgagcaatgcagtctttcctaatgaataactaactgtatgaaaatactatacttactttttgtcctgagaactgtatttttgaactatattgttactcattgctccctgtgtttgagaaaattcacctggctgggcgcagtggctcatgcctgtaacttcagcactttcagaggctgaggcaggatgaatgcttgagcccaggagttcgagaccagcctgggcaacatggcgagaccccatctttacaaaaacattaaaaaaaaaatagctgggtgtgatgttatcagcctgcagtttcagctacttgggaggctgaggtgggaggatcacctgagtctggggaagtcaaggctgcagtaagccatgatagcacctgtgcactttagcctgggtgacagagcaagaccctgtggaaagaaagaacaggaaggacgaatggatggaaggaaggaaacattcatctaggatgtatctgaagacaacagtcagtggtattgcttatataatcaatagcaccataatcattcacatgtaaagtattagcatcagtttttttccattcatcttctggtttatctaagtgaaatatcttcgtttgtcaactttcctctttgacattacagacagaaaaatactgaatcatcaatttttaataaaaacttaaaacaaaagggaaagactataaagacagtgtctccagatgttttatttttatttttttacattcttgaaagataatgtagtataatgggctctaagaaaactgaagatggggctgggtacggtggctagcctgtaatcctagcactttggaaggctgaggtgggaggatcactggagcccaggagtttgaggttacagtgagctatgactgagttactgtacaccgcattctagcctgcgtgacagaataagacactatttctttaaaaaaaaaaaaaaaaaaggaaggaaggaagggagagagagagagaaagaaagaaagggaggggaggggaggaatagaatgacggtaaaacagtgatgatttcagtattgcctcatccttctagacacttccgttatttttactttttattattttagccttttttttaaaggacagttgggaataaataataaattcattgccaaaatggtaaaatgccaaaatacttaaagatacagaaaaaataagatcactaagattccatatgtacttttgacttctaaaaggttccaatggacatatatagtaacagcaaggtactatgtttgagtctattaaggacacattcattaaaacttcaaaaatgtggtattatccttcctaccacttacaaatatattttttaaaaaagcatttgaaaactaaaactgagtccaaagaaccctgatagtataccaaaggttaatgtatttcatgataataaaattcatgtccaactacttaacaatgttaaaattataaacagaatcttccttttattaatttaaaattgtttataagcataaaaatcctttaaagtttataaagttaagattttactgatctacatcatgtggtggaaaaaatcattgtggtgaaaaagaattattttagaaagtaataaaatcaaactaaaccatgaaaaaattccatggaatcttcaccatatgcgtagattgatttggggaaagatctaagtttcaacacaaactagtttaatgaaatatctaataaaatgcttgaattacacagtatattttaaaaagagctacatttacttttttttataagtatctgaaaagtacagaactaagtgataggtaatttttttagagctttttaaataaaagacagtagtaaatactgtgcatactaacagttcacaaatgggtgctatattgattctctaaaatagctaaactattttcattgcaatatgttttacattttctgtttggaaatggtttattaaacaaagggaaactttgtggaacttctacacactttaaaatgataaaatccaagtgataaaattttacttagttaaatgaagaatgcatctggcagaattcttacatgtaggactatttttggttgagaatagagaaataatgacaacggtctttctccagctgtttttaaggattcagtatcttacttgcaattaaatactccattaaaaacacatttaaatgattaaacatctacgagttcacttggtatgccatttaaattatatctaaggactacctcatgacttccaattgtgtccatgagatctcccccaatttgttctgcaatatcaagtaatacctatttgagtactgaatttaaagggatttctacaatgcagctttgaccattaggacacttggctttgcctggttcctcaaaatgcgtaagtaatcaaagggctacttaattatgtcattcaagaataactcctaatggacaatattattatctatattccactgtggataatttcaggggtatttttatacaaatggtaagaaaaacattaatatgtttcattaaacattagaagaaaaatatctaagtacatactaagaagattccaaagtcctaattattgactcttttatttaaaaaaaatacagatccaggtattcggagaactctcgttgttctccaaagcagggctttgaaaggaagttttaaaagctgaatgagaaacactaagccaaaaacaatttaccaacaggatgtaactccaaacattttatccgaagggatgaaagtagctttccaaaccaagggccaatgaaaagttaaaatacgtaaaacccaacacttaatttcacataaaaagaaaggaaaagtaacattttaggtatgggtcccgaagtttcatttaagaagacaacagtgaatcctctattatcaattaaaaagtcactggaaaaaacatttaaaaaggaataaaagaaacattcaagtgttgacatttcacagcagggaataataagacaataaaagaatatgcctgaagtttcatttcttaaaatatatttctaattacttgaaaaaaatgaatcaaaattaatatatgtcttttaagggaatctgaattccaagataataactttctttgaagtattatctttatgaaaaggtagatgtgtggtcatacaatttaacagatgccaaaaataattatctaaatacattttgctcaactgagggcctcaacatttgaaatgagaactgaggagtttcttgctctctcccaggggttctcattttaggtgcagatactcctcagagacaggtggcatggacaccagagacaccggtgacgaaaacagctgcccaggctgctctccactgcaacctgaaggacttaattttttggcccaaggccaaatttgctcctaacttctaggtccattggctttaacttgctcgtcagctgcttccataggagtaaaatagtgtcattcacattcccaactaaaaaagactcattagagacactcctgcgggagtaactcaagcattcaacgcaaggacacatgtatatgaggacccctctaaatctaaaattttattcctatgattccaagtaatttgtcaaattatagctgatgaaaatgacaagcattttaacgagaaagatgatatgctgtcataaagttgtggaaatagccctgaccaatatgttttactgtcttttcaataaattccgggggaaggaaatggttttgaaatagccacacactcaacccacctaatgccccaaaaggtatctatgttcacaactttcttctgtagggtcacagaattgcaaacagatgtttatttaaaagctaaatatgagcttatattcaaattggaacttttgcttatctcataacagctatatactgaataaaatggaggataatcacaaagatttaagatctttgatgacacaaataaaagagacagatgaaataaccgttctggtgacagaaagaaacaccccataattgatacggcaaaataaagaagggcttctttgttttgaattctcctcagaaggcctaggtatatgaatcggattcaataaatttgctattcattttacactgcctctatagttaatcttaaaaacatttaatttttaaacaaaattaagatgaaaaagttggagattttaagttaaaaatcaaagatctagacaaaggagctagagaaagagctaaactgccaaacaatttctatttcaaaaacacaatacatttctggatgctgtacttcactctgtcttgaaaatactgacactggaaaattgttaaataaagttaattttacctacaatttttaaagctccagaaaactattacatgacagacagtacatacctatttatgattagtactaatgtctattcactaccttctactgttatcaaagaaacaatagtttttcttaatgaacacaaaataatcattaacaaattattttggcagcacataagtataagaaaagagtgtaaatacaaaattaacagagagtgtttgcttctcacctttctcaacagctctttggagtaactggtgctttctatcagttttcaagagcataatattttccaatctctatcaaaataagaaatgtaatggaaaatggatctttcttcttctggaattgcttgagtgtttatagtatatatgcagggatatcctttgagatgggagcatcaatcctactaaactcaactatggtttccccatccctaaaatagatttgacatacagacacaagcacaaggtcaaggtcacagatcagcaagaaagattaccaacagaactgatgtaaccagctggcttttgatcaaagctcctagggtttttagtacacttagacactctgcacttacccacatagtatatactctgttttaaaaatgttccccatctttgaagtcaagatcttcatgcacttcttattataaagtatgttttgttaaatatattgcattggatcaagaataagaggagaaaccagtatgtttgttttttttaatagcgacggggttttaccttcttggccaggcttgtcttgaactcctgacctcgtgatccacctgccttggcctcccaaagtgctgggattacaggtgtgagccactgcacccggccagaattgtgaatttttatgtgtttgtgtgcctgtatatatatatgcttgcacttttatttgtttgcttgttataactgatcattgccatgtgacaattttaaaattaacttaacttgcagttccctgaatagataatgctctctcataattccaagcttttgacccatctgaaactgaaattagtagtatgctctgcaatgccttgggtcacttgttcccaaaaacacagacttaacttgtaagtcactgcttcaacaaaagaagttttataatttatccatagtcttccacaacaattttcaaatcacagggatcaaaagaaactttagttatcaacaatgacaaaaacaaaaagtgattcttaaaggaatatattattaaatatattagtgcaggctagatgtggtggctcaacctgtaatcccagcactctgggaggctgaggcgggaggagttcaagaccagcctggccaacatggtgaaatcctgtctctactaaaaatacaaaaattaggtggacacagtggcatgagcctgtaatcccagctactcaggaggctgaggcacgagaatcgcttaaacctggaaggcggaggttgcagtgagccaagatcgcactattgcactccagctgggtgacagagcgagactccgtatcaaaataaaataaaataaaataaaaataaaataaatacatacatatatgcaattatctaacaaaatcatgccttttgttttagctgtttaaacaagatgttaaatttattttaagttacatttatgaaaccaagagttatgtgatcaatgttcttactgaagcattctggtcaagaaatcattttgaaggatgcataaagctgttggggtaaatttacactataaaagctttccttgctaaatcaagtaccacctgctgtagctttatacaatttgcaaactacttatgctatatgtacatgtaaatgttctcaattagtggtttttcatatttttgataaattaaatacctttgcatgaaaataacccaaaatttactatcctagaaagattgctagtttttcaaaaataaagtaaaaaagaaaaattatgtcaaattatcaaattaaatactattgaaatgacttatatgacatcactctagtcattacaggctccaaacacaaagatatctagatagaagtttccagtcaagctgtggaagagaaatatcactacagacacaattcatgagcacccagacatggtggtgatacctgtgaagagtcaataaatctgactaggtcccatcctacaggattaaggaatcaaaaccaaaaatactacatgcacaatgtacctgcagaaattctatgtctttaaattttcacaggtaacattaaagtatgtctgtcaacttggaaaatgaagctaccagcacaccatcagcaggccacttacttactttaaatggttttatttatttttattgaagaaactgcggtgcgtgctttaccctgatctcttatttgcccatctatccatacaaccaagtgtttgaagtactaatctcaggaacaatagccagtaaatgctaatctgagaaccagttctgctgttgtccaggtttagggcacgttctgcctgtgcagcagggacagtgacacatgctccttggcatggcacctgccactcatagtcagatacagacccaggttggggagactcaggaggctttagaggatgactccggtgtgctgaggagacagaggcagattagcggtctagggaatgtgggtcagggcttttgtgatttcaattgttggaccaaaaatgtttcagaacaacttttctcttaacaataaagaacattaaaaacaactacttacttcctactattagcatcatttaataaaattaaatcactttaacactgaaaactaaaatctttaatgaaaatctctcatcatttttctgttgctttttgtcttgagatagaatgatgtgtggaatagtacatatatactatattgatctcttcactatttagtagttcatttgatttttttttttttttttgagacagagtcttgctctgtcacccaggttggaatgcagcagcgccatctcagctcagcacaacctccgactccccaggatcaagcgatcctcctacctcagcatcctgagcagctgggaccacaggcacacaccaccatgcctgactaacttttgatttttgtagggacgggttttaccatattgcccagggtggtctcaagctcctgggctcaagagatcctcctgccttggcctcccaaagtgttgagattacaggcatgagccacgatgctcggtcctagttcattcaactcttaagttacttaaatctttacatcagaatttcccactgtttatattttgctttgtgttttggtctttcccttgatttcaattatcacatttatataaaatatataatttgttctatagaaattcttgtcattaaacaagaggttataaataagacagcaggggagaaacagggcagtaagaagaataaagaaccttctgcttagtgcccttccccccatatcatccttaccatcctcatcttttgaggaaaaatacatcagacttaaaaatgcatacagaatcctgtaataagccccatttgtttacagtcaagctaaacaactaggacatttctttcattctgtaagtctcagctgacaactcatcctctctttaggcagccttcactgaactccatagcctgagggtagttgttcctctctgtgactccacggcactcagtagatctttcaatcatcttgcttacaaaactgtacggtcacacgtcattttattgtgctttgcttcattgtactttgccattattgtggggtttttttttgttttttttttgttttttttttttacaatctaaggatttgtggcaattctgttgaggaagtctattggtaccacttttccaacagcatgtgcccactttgtagctctatgtctcatttaggtatttctcacaatatttcaagctttttcattattattctatctgctacggtgatgtgtgatctttggtgttactattataattgttttggggtgccatgaactgtgcccatatcacagcatacttaataaatatgtatgttctgattgctccaccacttagctgttcccatctctctccctctcctcagtcctttttattgcctgagacacaacaatattgaaattagatcaattaataaccctacaatggcctctgtgtgttttgcatgtctcacactttaaatcaaaagctagaaatgattaagcttagtgaggaaggatgttgaaagccaagacaggccaaaagctcagcctcttgcaccagttaaccaaattgcaaatacaaaaaaaaaaaacaattattgtaggaaattaaaaatgtcactccagtgaacacatgaatgataagaaaacaaaacaaccttattgctgacatacagaaagcttttgtggtctggatttaagatcaaaccagctattacattcccttaaaccaaagcctaatccagagcaaggccctaactctcttcaattctatgaagactgagagaggtgaggaagcggcagaggtggctcatacgatttaagggagaaaacaataaaactgcaaagggaagcagcaaatgctgacagaaaagctcagcaagaaaagccagaagatccagctgagtgagataaatgatgaaggtggttacactaaacaacagattttcaatagagacaaaacagccttaaattggaagaagattccatctagaaatttcatagctagagagaggtcaatatctggcttcaaagcttcaaaggaaagactgactctcttggtaaaggctgatgaagctggaacttgaggttgaagccaatgctcatataccattccaaaaatcctaaacccttaaaaatgacgataaatctactctgcctttgctacataaatggaacaacaaagcctggaggaaagcacatctgtttacaccatgatttgctgaatattttaagcccgctgttgggacctactggacaaaaacaaaaattcctttcaaaatattacaggccatgtacctgtacactaagagctctgctgcagttgtacaaggagattaatgttgtttttatgcctgctaacacaacatccattctgcagctcatggatcaaagagtaattttgacttcatatcttattggaaaaacacattttctaaggctttagctgtcatcaaaagtgattcctctgattggatctgggcagagtcaactgaaaagcttctgaaaaggattcaccattctagatgtcattaagaacattcatgattcatgaggggaggtcaaatatcaacatttgcaacttcatggatgactttgaggaattcaagacttcagtggaagaagcaactgcagatgtggtagaaaaagcaaaagaactagaagtgagcctaaagatgtgggtaaatttctgtaacctcataataaaacataaatgaatgaggagttgttgcgggtttttttttttttttcaactcctgagctcaagtgatcctcccacatcggcctcccaaagtgcagggattacaggcatgagccactacaccgagcctgaggagttgcttcttacacatgtgtaaagaaagcagtttcttgagatggaatctactctggtgaagagactgtgaacactgttgaaaaaacaacaaaggatttagaatattctgtaaatataaacttagtagataaagcagtaggaggtttgagaggattgactctttttgaaagaagttctcctgtgggtaaaatgctatcatcaaacagcaacacatgctacagagaaatattccatgaaaggatgtcagtcaacgtggcgaatttcattgttgtcttattttaagaaatcattacagagaccccaaccttcagcaacctccccctgattcttcggcagccatcaacatggaggcaaggcctctaccagaagaaagattatagttctctgaaggttcagaggatcattagtatttttttagctataaggtatttttaagttaaggtatgcacattatttttagacataatgctatggcacacttaacagactacagtatagtgtaaacgtaacttttatatggactgaaaaaccaaaaaatgtgcttgctttactgaggtattcatttcactgcagtgtctggaattgaacctgcaatatctctgaggtatgcttgtgttttggttcgttaaggcctggttccccatgagagtataaactccttatgggcaagaattatgtctttttcatctttacatcttagcacctagcagaggcagcattcctagtagaacatgctgtaaacagcaagtaaaccttttggagccttggtctgcaaaataaggagtgggctgtcataattctatggaaataggagaattaaaatgatatgacaatgttatttaaaatgatggtttcagatccaatatatctttttccctggaatataaattaataaaaaggcacaaaattaaagaataaaaaagtattttatcctacagagagttctgtgggtttagaaaacatgcgtgactaatattatggtagaaaacccacaagatttaagccagctatctatcatctatcatctggttttaaactcctgacctcaagtgatccacccgcctcggccccccaaagtgctggaattaccagtgtgagccaccatgcctggcaaagtattttaaaaatatacatatttttagagtattttaaagtttttgtaagatgatctttattttaccacttgtttatgaagaactgatcatactaatttggtttcttttagttgctgtttcccatgtcaaggttagtaagatctggtatggatttaggttatatcaagaatgagtatatgcttcaaaataccagttccatcaagcttttcatcatttttccttttcaaattacctcccctagataaagatgaaaacccagttaacattaaaatactactttgttacattttcttttgatggagatattaagaaatgaagtatcacatcaaaagatttagtctctaaaaccagacattcattctaaaaaataagttacaatgaaataggcaaagtaagcctttatgcaagaaaggctttttatttatttatttttttacagtatcaaccacaattaaactatttctctgtgcccattttaaaaatcaatcattgaagcagataataattatatgccaaagaatttgagccctttaaatgtgtgataaagattaaatcaaattggtcaaagctattcttggaatgatctttttaatttgaatctgtatttgttgaagagcttcaagtatgaatgttcaatgaatatggctaaataaaaacagtatcttaactaaagtgattaattatgaaaaaagtagtgaaattcccttttaaataactgaaacctgaaaaactaaaaaccaattcaacaacaacaaccattacccaaataagtcttgaatactgatgcaagacgactcacgtgtcattgccacggctttcaactttttaccatattagcatgttaccattagtagaaacataaaatcaagacaaatcactcctttgacctctttcaaagagtttcagatccactctcgccttatggcataatattaaactttaataacatttctcaggtctgagaaggctaaaaagtcatgtgggtccagaaaagatctcactttgctgtgaatgggtaagatttagaaacctagtgttctaaaatgcatagttaagacactcttttatttaggcaattgtttaggtatttgttttaaatatatgacacatcaaatcaaatttccttgtctataattagaaaacggagatttttggcatatattttattcatttgaactaacgacttaaactaaacttacaaacatcttatccttcataataccagattacacaaatttaaagaacttgtatccaattggaagggcagctaatttttatgaggtgaaatctattttcctctaataattttgccactggctactgttttcataatagcatggcatgtaaagtaattctccaaacatgacagaatcataatttaaaggttgggaggcagttgaaaagtcatctgcctaatcaatcatcctgtctgatgcttaatcccctttataacccatttgctatctctggatatctagcttatttctaaaaacctctagtgaccatgaactatcttccaaggtggtcttttggagacggatggctctgggttcaatttattccggctctaccatttaccaactctttgatcataggaaagttggctactcttgaaagtttatcattattaaacgtgcaaaagcactaatacctgtttcatagagcccctgggctgaacaaatgtggtaatgctcacatagcctagccacagagtcgctgctcagtaagagttccttgcgtaactccaacagtatgaaattctgccttgcactgagctataatctgttgagttttagtctgactattggtctttttggggacacaaaaaacaaggctaatccatcagttacctttcaaacattagaaacctgctgccaggttccactgaccaggtctgtcaccttgttaaggccaagataagatagtgaaaacccattgttgacaggggcttagcaaagggcaatcaaaggaagacaaatgttcctggggccagtctgtggtgggtgctgcagagatgcaattctttacaaattcttgactggccaaaacagtgtataaaacctcctgggagctcttgtcactgaccgttgattcctacaaagtgtattttacattttaaaagccctgctttatcacaggtgctttaagccatactcacccttcctcgaatgaaatactaggatagagttgtctttgattctcctcacggggttggttaatacattatttatcctcattcccatgttaccagggcactaaagctcagaacaactgagtggttggttaattatccagtaaatgcctgatccaaaaccacgtcaaggtcttctggaacacagtctttcctatcatattcaattgccacagactgtaacaaatgtggatttgaaaacttttcgtaaagcaaaatttatgcagcactctgagaattctggattacttttcccactctaaaatcttgtctctgccagtgtcagtctcttgcttttattaggaaggccacaaagcattgtggtgaaaagaacagtctctggattcctgactctgctattcagtagtgggtcactttggtggatttacttaactgttccgaggctcagttttttcagctgtaaaaggaataataatagtatttaccttataaaactgttgtattaaataaaaggtacatgtaaaacagtataatatctcacattttctaagcactcaatgaatgttaattgttttactattcacagacaaagcttcagcccagagaactttctcaaacaaaattttttttgacttactagtcaccctatataaagctccttgaggcttaggattgtcttttgtctttagatagatagatagatagatagatagatagatagacagacagatagatagataatatagatagatagtatatatatatgtgtgtgtgtgtgtgtgtatatatatatatatatcctgaaaaactaaagaaaaagcatttggatctgtaaaataatttaataatctaggtaattaattctttcactcataattttgtgtgacaggtttacttaaagcaaaaagtaatttcatatacaaaagatgcatataatttcttccttacctaaacctttttcttaagaacctatacccaaaccacagacctcaggagaatggaacaacactgggaacctaactaatggaccaatcatttcctctcttgacatctggaattcagagggagacagaaagcttcattttggagtggacttcatgaggccacatttcagattagtgcctagaggagtcagtattctgagagaaaagattgaagtaagcacacagagagaagcagagatgagggaggcaaaacgaggagaggagaggagaggagagggaagggacagcagggaggtgctgaatgaatggctttccagcttcaggaggggcaaagtactccgatcaccaggttcctgaagagttcgctgcatgcctctaacaagtcctcctgtacctgagctttgttgaggggcttctgttccctgtaatcacaccacccctaagatactgcagtaacattatgtaagacaaactgcacattttaatccatggtcctgaagaactctgcaaacgctcttttttctcacttttcctatggtgcctttacctcacgtatggtcaaagagcaacatgtggctctgaatttcaaatggggaaagctaacagcacaaagaggtaaataagatgtccaaggtcatacttacagtttgtaggggcggaaccaacaacagaatttcatatttcttattccgaggggcctgcactaaccaataaaccaactgcctcccttgatgaaactaaagtatgccaattatccaaactgtgtaggaaacgttgaccaaaacaggggttaattggacattggttgttttaattccataatcagctccttccctgagctaccctgggagtgaataacatatctttcacaggaatgggaaggaagccagcataggccatctggctgaacatgtcctttcctcaagttatccctgcagctgtgtgaaacttaactgatgttgaagaactttacagtttaatttgctttatcatgttccctctattccattaaaattaaaagtagacaaatctttatgttcatattagccaagcagtttccctgactccaaagtcatggaatatacatgaacatatatagtctatgtgtgtgtggaggtgaggaggaggggagcctgaaatttttggatatcaagaaacacgtttcatattcaaaaagaacaattcatttagactagggccactagaaaataaacaaaaacttgtcattttcacatgaaaatgaaactaaaatactggtcttattaatcatgaaaaaaaaagaaacatgaaagagaataggtagcttatttccttgcccattttccccacttctcctactttgtaaatttgtaaatatgacaataaatctagactattaagtggaagagtatttcctaatgaatactctagaatcagatgtgcatccgtcaagtgggttcagtcacgattctagcgccactagcctaagagctgctccagaaggtgagcatgtactctttccctctcaacaattctctcttcctgcctccctccacccctcctcttacatggtttattttcttcttttctccatcttttatttctcaagtttgaatgtatttctacctgtcttactcatgaacattgctggcattcagatactgatataatgccaccatattccttatgctgggaactgtgtactagggagggccggggtgggttacttttaagcaatgcaaatactaatgcccaagtttgggtcagactagggctgtccaagccctagatgatgagccttgagcaaggttgaagagacttgagtaaggatgagaattaatgaggcagtgtagagggaatgtcttttcccaatacaaaatttaggtactatgactattaactagaagaaggtaagagccagagggcaacagtaagaaacagccaagaggtaatgaaatcttaaaagagatgctggtgttcaagctatatgtgtgaacagacatggaaaatgaattcctaaagtgaaactctaatgcaaagactgggtggatggttatgttgaagttggccagcaaacaaagaccagatggttctccctcagagggctagatggcaaaatattagataaagggaccctgatacagctaacttctatcatttctagcatcatatgcctgtatttataataataaatggacatagcatctaataataagtagccatcacactgcctgcaaagttcattagtgaagttgagtgggaagaagggttaccctaggtcaggtaaggccagttgtacctaagggctctacgtgcttctcgtttcatttgctgctgtcaactattaggttgccgcatgtctctacttcttcttaaataaactctgatggctcctggtcctagattacagccctggcccaaaatgtcttgacaacaattgcctaaaggaaggagtcaggaacaacaattattccatggtgtgatggctaagaaaaagaggcaaaagattccactgctgtagttctaactacttctcacttactttctttgtgcgtatcatgtaacatgcctcttcttattaacaggacctgggctctgtgggactgctctgaatctgtccatgcaaaccaacttttggaactctggggctacgagataaaggagaagaaaaaatgttctaggtgttattttctctttgtgcctcactctattcatttaaaaaaagaaagctcaacaagatcctctttgagattctactgcattttcctgggcttcagttattttacctccttattttaaaggcctttttgagaatgttgttagttcagctaaacatgatgactctgcctttcttcctctgctctatcttgtaggactgatgttcctttcaggcagaagcatgcatttccactcctgacagaataagatgccttatttcacctcccctattacccacaaaaagggagacttgtaagtgtcactccagaatttttgccattgagttttagagaatatcatggccataaaaaggaaataaaattatttgcataaataatgtcaaattttcaaaaagtaaatggaataaaatactcttgtatagaaaggaagaaataaaaggaagcaaggtcactgttccattcattttccccacaatattattaacacccaggcatatgataaagatttgtcaaaagacttcctaatattaaattggaagatgactaaaaatgttgtctatttacatctgagatagcaagaaacctcatccagaattaaaaagctgcgttcctttcatcttttttttccttttcccctttctctgaccaacattttctcctctattctaaatattgtacacagcccaaaggaagtcagtcttgttttgttttgtatgctttcagacaggtctcactctgttgcccaggcctgagtgtggtggtgtgaccatgactcactgcagcctgaaactcctgggctcaagcaatcctcccacctcagcctccggaatagacggggactatagttgcgtgccaccatgcttggctaattttacatgtttgtttgtttgtttatagagacggggtttcgaaatgttgcccaggttggtctagaactcccggactcaagtgatcccccgaccaggcctcccaaagtgctgggattatcggtgtgagccaccaacccctgcagagtctacatctgaaataaaccacagaagcaaggatatcacttaaacaatgtaacttaccaattcagtctgagtgagttttgtagtttataacatattgatgaaaacagttaagtgtccacattccgtttacataagagaatgctattcaagcttttaaaataaaaaacttaaactattcccctcaccccccaaaaagtctaactataaagatgggtttgctacaaaataattagcaaaactgatttaccaagtaagatgtcctcccgctcactgccccccagaaatacgtatactgtaggaatactcctaggaagtgacacaagtgaaagaaagaatattctttcaatatgctaaaaacatctacagtgcactaaaaaaaagtccctaaatttggcaatacatttcttccaaaaatgttattcaataacataaacattatgaagtagaactggctgtcccatatgttcagaataaaagggttaagtggagtcctgcataactagcaaagtggaagaataaatggtaagattaagacatacacatacaaacattaaaatctaaatatcagaacaactaaataaaaatttaccttgcatctctacttttaactatataataaaaaatggtcattggatagctgatacttgtcaaatctcagcaaacttatgagagagaagggataaaaatggttaaaccttaaaatacctgttcaataatcagtttttaattatcaaaaaaatgttgacatgaaaggcacttctacaattgcaaagggaaaccttgtattttgcatggctatgtagttatacctttgtgttatcagtggtgagtctggagataaaagatgatcacacataaccaactaaaatcgagaccagtaatgaccaaaaaaaaaaaaaaatcagggctgagaagcttcctatacttgacttcataaactattttactgtattggttactcagaggactagataccactccaatccacaaattgtcaacctcaacaatttaaatgtacgagtcagattttccacagttcacttctgaaagatcttcatttatacaaatatcccttctatattcatatctaaaagataccatgagccttaaaaacagtaacactgagggtcaaccatttgctctgtaaccccagcttaaatgtgtctgagcctcagtttaacatgtataacaatgtatttaatggagcagttatgaaaattaaagatgacaacgtcagcctgggcaacacagcgagaccccatctctaaaaaaataaaaataaaaaaatagctgggtgtggtggcacgtgcctgttgtcccagcttcttgggaggctgacacggaaggatcgcttgatcccaggaagttgaggctgcagtgaggtgagatcatgccactgtgctccagcctgggcaacagagagagatatgtctcaaaaaaaaaaatgacagtgtatatacaacgtccaatccaacacaggaggtcctcaagaaatgttaattcacctttttccttctttgtattacttactactttgaaaatgtttttatactcaagtatcttgaacaattttcggtataatactcataccaagtatctggtatttccaattcctgacagattctgacatctacagttggatcatgtatttatatattttactatgccttggtactttcaatcatatgacactgcttagtcacaataagcgtattgattcctctatcctattgtttataaaaccatccattaaaggcaaattgcaagatttttttgggggtggggtgggggcgcagactgagtcttgctctatcgcccaggctggagtgcagtggtacgatctcagctcactgcaacctccgcctcccgagttcaagtgattctcatgcctcagactcttgagtagctgggattacaggggtgcaccaccatgcctggctaatttttgtatttttagtagagacgaggtttcgccatgttggccaggctggtctcgaacgcctgacctcaagtgatccgcctacctcagcctcccagaatgctgggattacatgcaaattgcaagatttttatgctatacagagagttttcttgagtgctatctaacttttttattattttcatttgactagagaaaataaaactattagcttactgaaaaggatcagccttctgagtgatatgacatggatcaactttaatttcactcaagaaacaattttttaaaaatagaaattttcattggaatttcaaatgaactttgctttttacagtgaaaaacattgttgtcaactgcaaacgatatacaacaggcattttgtgaagacatttcatttcaaagataccttaaaaaagtagacagcacactgaagctaagagaaccagccttaaagtcaggtggccaggctttgaatcttaggttcaggcagtaacttttctgagattctagggataatattaactatttaacagggctgtaaaaaaaatgaaagcacttaacattgtgtctgctatcctctaagtactcaacaagttcaagtattctagagcaaacaaattttatttttccctctgaagtaaaagcaaaaacctacactcacctgccttgtattttatcagtactacaaaataaatccaaaaccttttgccatcactcagtagtataagtaacaataaaaacccaaagggtaataattattccaatttcatacacattaaatgatggtattgcaaatacagcttctgatccaaataaaacaaatggaaaatgtaactcacattcatgcagacagacaaccacatacatactaaataaaaggagtaactagataagcagaaatcacaagacatatgtcaaagatctgagttttagcctagagactgtcatttgcttaccagtattaaccttggcagcttgcatttaattaagtctcagtttcttcatttacaaaagagggagaaggagtcctactgcagagaatagttgggaagattacaggctggactgtatgaggaggtttcttaaacctgggatacaaggccttctgagaaatgcacatgtaggcctatgggatctgagattgtcagtagcttccaataaatcatcagttacttgaaccacaaaatattatgaaatgtaggtttgtcaaaacgcttcagaatctttaaagctataaatgattttaaagtcgtgttaaacttgcatgaattacagtgttctgggagagtgagagatttaattttgtaagaattttaatatttcataaatatgaaagaaagagaattcttatatatgtaaaactatagcctaggaaattctgtcaaataagactgagaaactcactggtgattagagagactatttttaatgtaaatttgtctgacaactgttgtgataactggtttagctgtgtgtgcgtgtgtgtgtgtgtgtgtgtgtattactgtactcacttcctaactggccctcctccaacacattttccacactacagccaatgctctttgtaaaaggtaaatctcttggctaaaaactcataatagtttctatttcacttaagaataaagtctgaattcctttctatggtttggaaggctctgcatcaactggctccagtgcatctgaccaaccttatctcgcatcatttagtcctttgctcattcattacgctccagccaggcgatgtccaacagaaatgtaatgggagccaccaatacaactttaaattttgtagtagccacactttttcaaagttgaaaaaaagtaaaattaatttgagtatattttatttaacaaaacataccatggtatcaatatgaaatcactataaaattcttaagatacttcacattctttttgtagtactaagtccttcctccaagttggtgtgtattttacacctacagactacctccattccggaaagctgcatgtggcttgtggctcgtagcttcttcattggacagtacagctctccagctacacagacttctctggatcccagaacaccaacagtgctctccggtctttgggcgtctgtgtgagtggttctctcttttgagaaagttctttctggctttcttatggctgcctcctttgcctccttccccaaactcagcttaaatatcacccgctaagatacgtctttcccaatgactttaggcaaacagtctccccattttattccctagcagagcacctcggagatcacagttgtcttaggacttctctcattctgtcattttttgtgcttgctttccttgcttttcaaatatttgtttatgtcctgttttccaccactagactataactattgctccatgagaacaaggaccacttttattctgttcaccatgggcacatctgagataccgaatttttgctaaatataataaatgcacgtcattactcttagttgctccctggccacttctaacataatattcagaaacaactgggagcataatatacgcacaagaaaacaataaataaatatatataattatttaaattataaaccaaataaagatgcttacatgatataatttttgaaaaatccttattttcaagacacttgtataaagataaataaatcactttattaaaaattataagtactatccagttaaaaaataaaacttcacttaaactcaaatcaaatcataaggcatttcggatatttctccctttcctgccttcctgagaaaagcactgtgttaactgctcttcattcggcattcagacttttaaagtcagatcaccccagtctcctacagatctacaaaaaatctctaaatgccaataaatttttacaattaaagggagaaaaaaggaaactatgagtgatatttgaagaaagataaaggtttagttaagatttaaacaaactaaattttaccttttctgctcttaactctcattttccaaatcatttattgtaattctaaactgagattcacagctccttcagacatattatacttttaagtggaaaggtgatcactgacaagtatgcagtttttgatacatattttaataaattcggtacaaataaaaatcacataactgatcatgacaaagaatatatactttgggagaggaaaaaatatgactaaagtgacagaccattatctaggttaaaaactgagaataaattaataggtaaaaaatagacataaatggttggatacagctcccatattatggttacctagtcaagtcgtctgttattaacagcaggataaaaaaatacgtcagtagaagacatggtaatcttacacgtagacacacaaacccacaaaaataatcattatatatatcatttatattatccttgaatatatatgaaaaaatatatttttatatttatatatatacacataaatatatttatatatacaatttatatataatttgtatatactccaggtattatacatttgtcttctcatttaatcctcataacctaaagaggaagacactaaaataatccccattttgcagatggggaaactgtggtgtaaagaggtgaaataatttgcttgcacactttgcccaactgttgaactaaagaaccaggcctggagatttattttccagtaattggaaggaaagggttagaaacactttaccaccatccctatgacttgtaagcttataaacttaattttgagcatgagacagccacgtctccaaaccacactgctactgtctagcagcttctccagtatctctgtgtttggtcaatttggctttctgatcatttctctagttccttgttcatttctctactggaaataaaaccaagtcatgagtagcccatgtggttgaaggcctgacccacctacagctaagtctgtcagcaccctgaactaggcatgtgaattttggatggaccttctcagtctttaacctgaatatttatctgacatgtaccgctgggacctatctgcaaaccacagctccaatcccaggagtctaatctctccatgaacaatctgaattagaatatttcttgaatttcttgaaaagtcagcatttaattatcactgaaggaggcaagcattgccccttggtggtccccacatggcaagagactcaattggctgccttcctctgcaaagccatgactatattattaaagaaaacactgccacagataccaaatgtcaacagactatataacgtgtttgtgatgtgctacagttgacccttgaacaacgctggcttgcaccgtgtgggtccacttataagcaaattttcttccatttctgccaatcctgagacagcaacaccaactccttagcctacttaatgtgaagatgatgaggataaaacctttattatgatctacttccacttagcaaagagtgaatatattttctcttccttatagttttcttcagacatctttcctctagctaactttatcataagaatacagtatataatacctataacatataaaatacatgtcaatcaactgttttaatgttattggtgaggcttctggtcaacagtaggctatcagtagttaagttttgagggagtcaaaagttatatgcaaatgttttaactgcacagtggctgggactcctaatccccacattgtccaagggtcaactgtattcacaagtttattccagtgtgaactctcgtagaaagagagagagagaggcaggctcgtgctctgttgtccaggctggagtgcagtaattcaatcacagctccccataaccttgaactcttgggctcaagcaatcctctcgcctcaacctcccaagtagctagttaattttttaatttttagtagcgatagggtcttactatggtgcccagactgatcttgaactcctgggctcaagcaatcctcctacctcggcctcccaaactgctgggcttacaggggtgaaccactatgcctggccactgtaattttatgtaaagttttcttctcaaattttaatacctttcttcataatactaaatatgttgtcacccattcttggcatggaagtctactgagtccacatccatagggagcaattgaaaattctgtgtgtatgagtttgctttgatttatgttctatttggttataaactttactgcagctacaggaataaaatttggctaatataaacgtaacaattattatttcagaagcataaaattgaacaaagagttgataccaggttaaaaaaaaaatcacttttttaaaagctagatgatttgtgttttagccctggctcaggtcctaagcagttttataacagtggctaagtaggaacttgcctaaagcccagtgttctcatcagttaaacgaactctttataataattcctaaggttcctactgctcaagaactccagtccaagcctagctaacactggataccaagtaacactgcatgctcatttactgaacttagggaagtatcacccacataaagttgttctcatgaatgtcttccatttcatggcttaaattaatagccataataacatgtcaaatgtttgttttctctatagtttaatgtacctagatatatctgactaaaattaactggtgattttcttggatgtttaaaataatttgttgatattggttaataagcataatgtacctaaactgacaagatgaaactctaagaattagatttcacagcttaacaaaattcaacaacacagtagatctgcatatgaggggaaagaatagaggcaatttgaagggaagaagaactcaaagcacacatttggaagaagtacactttaagactcagtcatttgaactactctgactggaaaacaattccataaacaccattcagagagattcctgtttcttcaatacctagagtactttcaaaagagcaactcatgtaaaaactcactaccatgaacactgcacagattgaaaccacaaatagccaagagagaagaaaggaatgtatcggggtgggtgagaggggaaggtggttgaggattccttattcatgtgttcaacaaatgtttattaagcagttattatatgccaggtacagtgttaagcactgtggatactttggtaaacaaaatatagtcctttcctgttaaaacaatcttccactccatcaaaaaataaataaataagaaaaaaaaaggaaaatatcaattttctctacttggtaacctattttaacttccccatcttacttggctaattattaaccatgtgcatgccatgtatttcttttgagaaagtgaaagattctaaaatcttcaaaatttgtaaagtaattacaaaatcaaaaactgtaagtaaaaagagtttaaagaacatgtttaattctgaaaaataaaatattctgatttttagttccatagtttacttttcctctacaatttctgatatgttttttcaatagagaaaaacccacaaaactaggtgtacaaaaatacagtacaaataattttgatgcctatatccaattgaaacaaaatttaatagtctgaattttgtaagggagttccaaagttctttgaaaacatcccctttatagacaatatgacctcaaatagttcattttaatcaatgtttttatgtcacagagtgatatatttattattaacaggtgcttaaaaatgcttcttcacttggtcattttctataaaagtatctgcaagccagtctagaccaatgtctatagcttgtgattatacagatctccggaatgtcttcaggatgtataattactacatacagaacacttattcacacatttaaatggaagtgaaatgtaatctaaaaaatgtaaagctatatactagtttcaagaatacaaaagtaaacaataggaaacaactttcatttcatcagtgtattagtatgaggtattttgcttcctctctctcctaaatcaagtgttctgattgtaatcgaaggatcaggatggggacagaagagggaaaagggcacctgcagttcacatgtggcaagaggcttggacaagaggaatttcttttctccccttgcagtacagatttatacacaaccgaaaaagtgcagctatgaccacattttaagaatgcctaaaaatgcccaggagtctaatccctatcacagatattttaatcactttataaaatcttaaagcatttattcctttcatattaagtaacctcaaataacccaaattgtacactacaagtctctatttgagtaacaatcacagaattaaaaaaaattataagaaatatgcaatttccttttctacaaccgaataaaacagtataatgtttatgcaaatcaagctagcagaagaataaagtaaacaacacatttcttaatttcttaatatagttcaaggtggtgtagtggccacctcttttctttttttcatgaaaatctctttcctttgcaccatgttatataggatctttaagaatataatgtactgaagataatttaaaataattttctaaactatgtccataaccacctccatgactgctcccatctgatggttaaaatcttacagtactagcttgaatttcatctctgcctcacatgtttcaagcagggaagcagatttagtgcctcagaacactttacagggtttcattatcaatcaggttatgttcccggtgacgctttcagtaaaattatcttattcaaatgaactctcttggactgaagtaaacaaagctgtagcccattgctctcacatactctccattcatttatttcctttttctttacttagacttacagcacgtgccctagaaagagcgcatgttgaatattcctggagtgtcacaatatgcaatacaataaaacagattacggccctacctttctctcacagcagtggtgccaagcacaggtacaccggagtaatcaatttgttctgcagaccgtaaggctttcatagaatactaatgtaaaatctcttttctttctcctttgccttgactccctaatgcccaggtcccgaccaatacaaggaggagggcggtatgtcttctgctgagataaccacaactactaatcaagtatacgtgtacaagggcacaggattaaacctccaccaagcttgagtcagggtttgagagcagctaaacacatgcacagcatggtcaaaattaaacacacacacacacacgcacccacgcacacacacgtgccatgaaaatacagatgtgtctacttcggtgaactaattcatcacactttaccatgcctcgtttttttaatctcaggggcataaaattacctcctgttgaactgaggacttagattcaacagtgcccaacaattgtttttccagaaacgagaatcatgatcagtcttctttgtactcaactgttaaccatttttaaaactaggcatttttcttaattgtactatccagcgcagttttacatgaatttatcatttcaggtattaacatagggttaatagactctgcatggattcttcagattttacacttaaaaatatattgtaatagctcaagtctactttaccaagaaaagtatgtgcattaccagtaataagacatacaaaagattttcatgtatcttgaagtatttacattatgaataatcccaagctatttgaaaaatattttcaggtctcaacaattatttaaaaagcacctttaacacttcataattatggcatcacggtggtatggttaatcttataaatctagagttctggtgttcttttcaattagacattttcacttggcttatttttcttttattcaaaatatgaaaaggtatgccagtcattgagtaggcgaatgacagaagttgttaaatattttttaacaacatacattgccacattttaatttgcctgccttaattttcaaataactcttgaaaagtattgatagttaaggggctgcaaactaggcaaaaattaagaacaaaatactcaaaataactgaagaaacttattaggaggcatcctaagccgttctgttttcatgtaaacaactgctttaacactgctaaaatacatgtgtctcattttgcactttttctatttcttaaaaaaaatcagtaggaacaattaagaaatactagggactcaatgaagtattgcaataatgtttaatcgatactgatgcatttgtccttgacacactgaccatgtcatcaggctactgtcatcttatatcatgtcatttctccacctggctcatgaccttgtcctctaaatgacctaaagcttccctcaagtagcaggaggcccctccccgctgtctcagcaaggtcgaacgggtcagcgtgtcctcatctataatccaccaccatttgtcagcagggaggctggaggaggcaggcttgctacaaggggagaatgcccaattaggcagctgtcacacaaagcataggctgcaaaattatcccctgtcaaaagaaagagcagctgcgggtgccaattacagcaacctttcaaccctttaggtactggaaactacacagaagtaaatgaagaacaattagtgataacaaatcgatgaattaggacagtaaattagaaattactagcaggtgagcttgggtcatacatgacatttagggcacaccagactccaggcaagggcaggatgcaatgaatcacactaaccatttcctcacatatagatttcccctccaatattttctttttgcaaacctgagatctttaaaatacccatacctaaaaatatgtatcttaatatacacaccttttcatttcatggacccccaaaattgtttctcaataggagaaaaatccttcagaataataagtctagttcattctaacttgttttcacacagtccaacatgttatcccctcaaacaaatttcttaagtgtcgcccacaaaatccaaaatatcagtttaaatcatcacacttaaaatattgtacttgtcctgattctacttcagtcaaaaagcaactgggtataaattctgagaaaactgctttgctaatatcataatgttgaaggtaactttctctacacaatgtcattttgtggataaaaaaataactgccatgtgtgcttctatacataatacacataaagaaaatatcaaccacaaaattactctcttagattgttctgctccaatcctgcagaggtgatatacattaagtctcaagcacagaaagccaatgcacttggactttgtccaactaatttatttggtagttaacattcgcaggcagtgaaggaggaacatggggaaacaagccccaccaaggggagcagatccaatatggctaccgagtgttcatggacatggtttcattgtgccttaaaatgtcatgcatgttcagaaacaactttcttaaagtccatttttaactaagattaattttttttccatagaaaaaagatggtcttcctacatcagttctttgaaagttgagaaacctgaatgatacgtgctgttatttctaaagaggcaggagaaaattgcttaactagacttctaaatcacaaatggataaaagtgaggaagagagaaggtgaggcaataaagaagcactttactcacccacctccaacacattataaataaatcacagttgccagagggaaaagtgtgtaactcctagttcctaagtccagccatgtgataatgtttctaggagatagatgtcatggggagaaaacttctccatgaaaagtttatctgagaatttgatttataaattatatttcatcatttaaaaactgggcatttataaattctcttaagtttagaatgcaaccctctaaagtcagacataaggaattcaaagcaatgacaaatagataggaatgaaggagttaatgcctttagaattcagcttccatcatacatgggtgactatctctttaaataatttaaatcctctccatcaactacaaagctgttttgaagccatttagctttgttctttacatgtgttctaattaagagatgaccttgtcatcacacacaccagaaatccgggattatttcctacagcaaaaattcacagagccccccaaagaagaaaaaggggggtaaaaaagtcttcttcctcagttcctcactaaaggaagttgttggttggttgaacgctgaggcagtttcaccgcataatttttttgttgttgttgaatgtcacagggcgggttagtgtgaccttgagctgcatcagcagcacagcaagggtcgagatgcctgcaggcgcccttgtactggatttgcaagacaaaaaccttcaaactggctgaaggacatcttaaatctcttcaaaggttttccgaactaatctgggctgctcttagcaggatctgtgccagtgtgagaagcaaaattaaaaacaaggtctttgacaggatgttgtctcctcttaacccttcccaagcagaatagaacaaaccaccagcattctggagagagggtttacctagaagcattcttttataacaaattatgtaagcagacaatcacaaagaatggggcagttattagttctcaaaagtaaacaacccttccattgtgcttattaaagaattcaggtcgaattctttcttgactatatttcagtgtagtgaatgtaaaacttaaagctctatttgtatctttcagatttgtagcacagtcacaggttaagactaaaaaatatttccatcaatatttatctctagaattttcatttttaaaaaaaaatacatggttttagttggttaagtcacaaacttcacgcatactgcatatagcttactaaaattacaggtaaggaaaattacattatagcatgtttactaaatttcttattcccaacatgatgaatacattcttaagacggaaaaaaaaaatcattagaatagtgagtaacacaagtaaaacaaggtaaagcaatctcggtcttgttataaaaacatcagcatgacatttgatgttttagcattaccagtgcatgggccaaaagagaaagtattaatgccagtagagggtgtttgattcttccctggcaatgctctcaaaatttaatttagtagctaaagtaggcaaatgtttaaatcattactctagaacaacaaaaggaaaaaggtgaataaaatagtcctggctttcaagaaataaatagtctggtggaacaaacagctgtaatgcttaaatcacaatatatgctaaaatcagtgtgtctccatctataacatgctggtttgtcatcatcagatataaggtatgtcatgattagttctaaagagtatttagtgtaagtatttagtgttaagtacagaatttaataaggtctaagaggttgcaaattattcccttttaaaaaaacagactaaataaattcaagataacttgggtgataaccacactttcactcacttggattcaggtatgttttcctgaacaggacaggaaaaggacagagtaataacacctagtgagtaaataagacccgagagtgcacagtgccggtgattttcttccttagtctctgtgccaaaggagagagagtatatactgtgctaaatgcaatgactgaaatatgtaaaaagtgctctaggaacacagataggctgtaaccaggtttttagttcatatgtacacatgcaggtggtagtcagtgatggttaaaaaatgagtaagggctagccaggcagaagagaatggcagccattctagggtccagaaatagcactcaaaggcaaggaagagctgagtgtgacacaggaagtgtggtagtccaatgggagtggagattaggctggaaatgcaactgggaccaaggactttgaatcaaggccatgccaagaagctggcctttatctggtgggtttccttacaagcaatggtattattaaaagcatattagaaaaacaaaaccagaagctatgggagttgttgatagcttggagggaagaagaaactgtagatcagttagtgcactgccatggtcaaaataaggcaaaggcaggagagttgaagaaaaagacagctctggaaacaatgaaggctgctttgaatatttaaaaaccaatttgtttaacataaacagtgctataagatagggtgttatttcatagcaactttattgaatcaaagataaaaacgataaaaataattactatatctcaagcctaggtttgataaacactgtgctaaaaaaatgatttctacaaagtttcaaaaaagtagtaattcttacaggggtgctttaaagaggcagaatcagatcctgtttgaagtctgaattttgtactttgaactatcaaccttcattaagtattaggtaagggttttgctaagacagtgacatgtaccttttcagaacagtgtgagagcgtatttcccttggctataagacagagatgtccgacttaaattataatgtggttcttggagctaagagttctatccaacgctaatgagaaaaaaaattaactcagcaaacatttcttgagtcccgactacgtttaggacacagaattaaaaaataaaaactacccaacattctatcagcttcatgtttttagatgatcactcataatgatatcaagtcctcaaattccagcttgcatgacatcatcacacaataaaaacactacgagtaaaaacagtatgaagctgtcagtaaatcaagtgtcggaactagcagccatcttggtattccgatccagctgaaaggtacacaacgcattcccagaaccctcagggaagacccagcaccaatgtaatttgaagagcgtcgtcagatactctagagactgactgtcccgctgagacctcagaaagaatttaacagagtatcagccaaggtaagagagtagggagtaaaacagaacaggagtcaccagggccaagtaaatatctgccagagagcagactgtactctcagaaaaggaccgccagcatcagggatcaggttgaggcaagtggaggggaaggtcacacaaaggagagaaggaaagacttgaggggaagcctactcaatcctgcaaaataacacatcaacttcattttgtgaaacttttttaaacgaccaaacctctagagttgggcgaatcaccgtagaagaagtattagaaggtacacaaatcataaagaggacttgaaagccggggtagggggaaaattgacagggcaaaactaggaatgaccttactgagtatccacaaataaaatgacttctccttgagtaagcatctctgtcttacagctgccaagccaacgctggcagtaagtttcagcacattctaggtctagacattaatagaaaagtgggtaatatgatacaccgtgcagttattaaaaaaaaacttattagtctacaaacacaaaagcaaggttaacattattggaataaaaatatagaagattctgttcgcaattagacaagtgaattgccataatacagcagtcctcaaagggtggtccaaggatgccaggggtggccatgacccattcaggaggcacatgaagaaaagactactttcatactactaaatgttatctggcttttggtatcattccttcataagtgtacagtagagttgtctagaggctatatacatggaatgcatccttgtgtaactcttgttttaaattttttctcagtttaaatttctaatatgataaacatcagttgatatgaatctcataaataaaagctctcttgggtccttgataatttaagaatataaagttgtcttgaaagcaaaaagtttgaaagctgctgctattaatagttgaaaagtacaatgttggttttcttcaaacataatctcttctaatttcaagaatttccactataattatggcagataaatattgttctctgtgcagaatgtccctaagaccaagacgaggaaagaaaagaaagaactttctaaaaagatgagtaaactaaggaggatatgaaaaatctcccatctctagagtcgttattattctgaatttaccatacaaggagtaacaaatgtacaaatatttataaagaagctgctatgttgttaagagctgaagttataaggataactaagtgataaaccagcccttagtgggctcacaatctcatcgggaaaaaacagatcaacaacatagtgagatgctactaaaaagatggcatggacaaagtggagaaagcactgaaagacacaatttttggaagaagactgagtggtaaggcagggaacaccatttttagtgaaggttctctacagaggctgcatgtgaactgactctagggacaaacaaggctttctcaattagaaaagaagcttcagtattcttcagaaagtaggaggaccataagcccagtccaggaagcacaatggcatagagtatgttctagaaactttaagtaatcacctccaagaataaaaattgccagtaatgacaaacttttatagaacatgacaaaataatttgatggcatgttctataaaagttataattaaatttaatgatgaaagatgtggacttagattttgtagtcttgctaaaaacttctgtcatatagctttttaaaaagacaataaaagtgagttactaaaaaaaataaaatagaaacagacaaacaaattattggcctttactgcagatattttgagaagcactagcttggaggacaggctagaagatggcaggtggggaggaggtgcagagaggggcggcaacagcaggagacaaagcttcaagctagaagcttacatagactgtactatgaacatttttttaaataaataaatgcaaaaaggaagcaagcgaggtttgaaaattactcatatacctctaatccagaatgaagaaattctagttatctaaataaaatgcataagctctgacgttagaatcagaaaattttcagatatgcaaaccacaggccacatggttgaagggcaaatgtagcagagaatcaaggagactatcaggttcacaacagttaatttcagtgaaaaaagaccagggtctgtgtaagaagagaaagtgtattgacagtttgatcaacacttttaaaattattttgattccttcatttgaaacctttcatggaaaaggaaaaaaaaaaaaacctgagttgatatggaggcttcgcatatagcgactttataaaatctgagttgatatggaggcttagtctagtagggatcttcctccccaaacaacgtaagttatatcaattaagatactaagtaaaagacttaaggaaaagtcaattatttaaagataccaaattaaaaaaatgttaattgtattaatgtttcccatagtaacagtaagttaggattaaggaaggtctattacttttctatgttcattatgctattgcaattgctacattatttttgatcagacaagtaacacaagcaagctggagttttaggaagatctggtggttgtaaaagactcgaacaaggatgtcagtaaacaggcctgccagcacaagagctccagatgagaaatgataagactctgaacgaagatggctggctgtgagaaagggaattaagagtggatggaagcaatgctggaaactaacaatgattcatttgagccaagcatacagattttcttaccagggttatccacaaggccaggaaaacactagtgagaaggccaaattggtttacggcaattaattccaactaggacaactcacccagattataaattgatctttctttcaccagcatcacgtttctactaaaaatctggtgtgaaagtttaaacacattttacaaagagttatttcttaaacaaataaaaaaaaatatgactttgaggagtgttttatgaagttggacaggcattccatgtatacaattagcctactttaccaacctcgtaacccagctcatcagtactggcactttttttttgagatggagtcttgctctgtcgcccaggctggagtgcagtggcgcgatctcagctcactgcaagctccacctcccgggttcacgccattctcctgcctcagcctcccgagtagctgggactacaggcgcccgccatggcgcccggctaattttttgtatttttagtacagacagggtttcaccgtgtcagccaggatggtctcgatctcctgacctcgtgatccgcccgcctcggcctctcaaagtgctgggattgcaagcgtgagccaccacgcccagagtactggcccttttttaaaaaaaaatttatatagatattttatgtctgacaggaaagttttaaactcaagacatctattctaccatagttgtcaaaaatttaatcaaactagaaaaaagtacaatagagaactcgtcctagtggaaaaccatgacatataacaataaaaattccattagagaaaattagtatattcaagtgtttaagctaaattgatttatggtcatttagttaacactaccgaaaatattctctgtttttgtatcagcaattttatcaaaattagctaataaatattatacactgagataaacagcacagaaagtatataaagtcctataaaatataaaaaagggtgaattaattttgttagttactcaatatgatgattgtatctctttcaaaagaaggagctaacaaaatagcaagggaaacatggcctaagacactgaaaggctttttaaacacttcattctttatttagtttgcaatattcaattaattacatcctttttcctcccaatcattatctttgagctttcagtcaaaaaaaattactatacttaaaaatataacatgagtgttttgcagggtaagacaaactatagtaaaaacctcataaaacattagtttagaatcctcaacttgtcaaatactcatctcctgagatataccagatcctccttttggagacacagtccactggttaatgaaaggcatattgaaaagacattctatactttgacccaacatctcccaagcttatttgaccatggactgttcatttaaaaggaaaacatatttaacacaacacgttttagaaaaaacacatttgacataatcatctttaaaatctaaaaacgtttaaaaatatgtgaaaggaatatagaaaatcactatcagtaatttgtttttataaatttttagttttcaaagttgttcactatacattataatgtctttttttttttttttttttttttttgagacggagtctttctctgtcacccaggctggagtgcagtggcacaatcttggctcactgcaaccccgactgccgacttaagtgattctcctgcctcagcctcccaaataactgggactacaggcacgcgctaccacacctggctaatatttgtatttttagtagagacagggtttcaccatactggtcaggctggtcttgaactcctgacctcatgatctgcccaccttggcctcccaaagtgctgggattacaggtgtgagacaccatgcctggctgtctttttttttaatctggaagaaaaatctaaatttgacaattttctaagaacaactcattggctgtgtatatttaccagatggctacctataatttacttatccaactcctagttggatccagtgagcattgcttatcattctggctatgtggtaaaacaaaggtgttgaaaattaagaacaacaacaaaccaattatatcttgtggcggggcggtcacaggaatatgcatgattataatgttaattttaatagaattagaagttcagaaatggggttcaatatcaactgtttcatcaaatataaaagcagatttcagactgccaaccagtgattaacacctaattatatctgaataaaaaaattttagtatttacaaataattgcgtcattgattttaaattccaattataagtaaaatataaatgaatatacgaaaagtgacttgcaaccaaataattattagtaattttatgcagtcttttaaaaaataacattttaaagattttcttgatgaaattacaagaaaagctaagcatttaagtgggtgattaaaataacttcattactaggttttctgaacattatcagaatagtgaagaaaaagcagttaggattatccatatgaggcctacaggtaaagagcaaatttggctcaaagttgccattccctttttgaaacactgtggtcaggtaaaacatggtgaatttcagcatgctgtatctgctctctctctttgaccagagtttttcagttagctagatgaaactgaactattcacaacggattatgagcacaataatcaatcattatgcctttacctagttcacttggatttctccttcccagaaataagcagcataaggtccaagagcttaagacatgacaaattcatttaggttgtagctatactagaaaacaggagtgttaatccaagtagaattaaccacttgctcatcgtcttttttgttgctctgcccacctacttgtgttaatttaatccaattactttatcatttctcagaaatactaataatgctctttcctttgtaagaggaattttaataattccaaaagtaatcactggcctatactataataaacacacaataatcaaacatgcttctatttttcctcaaaacggtaattaactttttatctgaaatcagggattg
